(19) United States
(12) Patent Application Publication
(10) Pub. No.: US 2002/0165137 A1
(43) Pub. Date: Nov. 7, 2002

(54) Nucleic acids, proteins, and antibodies

(75) Inventors: Steven M. Ruben, Olney, MD (US); Steven C. Barash, Rockville, MD (US); Craig A. Rosen, Laytonsville, MD (US); Charles E. Birse, North Potomac, MD (US)

Correspondence Address: HUMAN GENOME SCIENCES INC, 9410 KEY WEST AVENUE, ROCKVILLE, MD, 20850

(73) Assignee: Human Genome Sciences, Inc., Rockville, MD (US)

(21) Appl. No.: 09/860,670

(22) Filed: May 21, 2001

Related U.S. Application Data
(63) Continuation-in-part of application No. PCT/US01/01346, filed on Jan. 17, 2001.
(63) Continuation-in-part of application No. 09/764,859, filed on Jan. 17, 2001.
(60) Provisional application No. 60/205,515, filed on May 19, 2000.
(60) Provisional application No. 60/179,065, filed on Jan. 31, 2000.
(60) Provisional application No. 60/180,628, filed on Feb. 4, 2000.
(60) Provisional application No. 60/225,447, filed on Aug. 14, 2000.
(60) Provisional application No. 60/218,290, filed on Jul. 14, 2000.
(60) Provisional application No. 60/216,880, filed on Jul. 7, 2000.
(60) Provisional application No. 60/234,997, filed on Sep. 25, 2000.
(60) Provisional application No. 60/229,343, filed on Sep. 1, 2000.
(60) Provisional application No. 60/236,367, filed on Sep. 29, 2000.
(60) Provisional application No. 60/239,937, filed on Oct. 13, 2000.
(60) Provisional application No. 60/249,210, filed on Nov. 17, 2000.
(60) Provisional application No. 60/249,211, filed on Nov. 17, 2000.
(60) Provisional application No. 60/249,214, filed on Nov. 17, 2000.
(60) Provisional application No. 60/231,243, filed on Sep. 8, 2000.
(60) Provisional application No. 60/246,477, filed on Nov. 8, 2000.
(60) Provisional application No. 60/246,528, filed on Nov. 8, 2000.
(60) Provisional application No. 60/246,525, filed on Nov. 8, 2000.
(60) Provisional application No. 60/246,476, filed on Nov. 8, 2000.
(60) Provisional application No. 60/246,526, filed on Nov. 8, 2000.
(60) Provisional application No. 60/249,265, filed on Nov. 17, 2000.
(60) Provisional application No. 60/230,437, filed on Sep. 6, 2000.
(60) Provisional application No. 60/251,990, filed on Dec. 8, 2000.
(60) Provisional application No. 60/251,988, filed on Dec. 5, 2000.
(60) Provisional application No. 60/251,030, filed on Dec. 5, 2000.
(60) Provisional application No. 60/251,479, filed on Dec. 6, 2000.
(60) Provisional application No. 60/256,719, filed on Dec. 5, 2000.
(60) Provisional application No. 60/250,160, filed on Dec. 1, 2000.
(60) Provisional application No. 60/251,989, filed on Dec. 8, 2000.
(60) Provisional application No. 60/250,391, filed on Dec. 1, 2000.
(60) Provisional application No. 60/254,097, filed on Dec. 11, 2000.
(60) Provisional application No. 60/179,065, filed on Jan. 31, 2000.
(60) Provisional application No. 60/180,628, filed on Feb. 4, 2000.
(60) Provisional application No. 60/214,886, filed on Jun. 28, 2000.
(60) Provisional application No. 60/217,487, filed on Jul. 11, 2000.
(60) Provisional application No. 60/225,758, filed on Aug. 14, 2000.
(60) Provisional application No. 60/220,963, filed on Jul. 26, 2000.
(60) Provisional application No. 60/217,496, filed on Jul. 11, 2000.
(60) Provisional application No. 60/225,447, filed on Aug. 14, 2000.
(60) Provisional application No. 60/218,290, filed on Jul. 14, 2000.
(60) Provisional application No. 60/225,757, filed on Aug. 14, 2000.
(60) Provisional application No. 60/226,868, filed on Aug. 22, 2000.
(60) Provisional application No. 60/216,647, filed on Jul. 7, 2000.
(60) Provisional application No. 60/225,267, filed on Aug. 14, 2000.
(60) Provisional application No. 60/216,880, filed on Jul. 7, 2000.
(60) Provisional application No. 60/225,270, filed on Aug. 14, 2000.
(60) Provisional application No. 60/251,869, filed on Dec. 8, 2000.
(60) Provisional application No. 60/235,834, filed on Sep. 27, 2000.
(60) Provisional application No. 60/234,274, filed on Sep. 21, 2000.

(51) Int. Cl. A61K 38/17; C12Q 1/68; C07H 21/04; C12N 9/00; C12N 5/06; C12P 21/02; C07K 14/435

(52) U.S. Cl. 514/12; 435/69.1; 435/325; 435/320.1; 435/183; 530/350; 536/23.2

(57) ABSTRACT

The present invention relates to novel proteins. More specifically, isolated nucleic acid molecules are provided encoding novel polypeptides. Novel polypeptides and antibodies that bind to these polypeptides are provided. Also provided are vectors, host cells, and recombinant and synthetic methods for producing human polynucleotides and/or polypeptides, and antibodies. The invention further relates to diagnostic and therapeutic methods useful for diagnosing, treating, preventing and/or prognosing disorders related to these novel polypeptides. The invention further relates to screening methods for identifying agonists and antagonists of polynucleotides and polypeptides of the invention. The present invention further relates to methods and/or compositions for inhibiting or enhancing the production and function of the polypeptides of the present invention.

[0001] This application claims benefit of priority under 35 U.S.C. 119(a) to the International Application No. PCT/US01/01346, filed Jan. 17, 2001 which International Application will be published by the International Bureau in the English language.

### FIELD OF THE INVENTION

[0002] The present invention relates to novel proteins. More specifically, isolated nucleic acid molecules are provided encoding novel polypeptides. Novel polypeptides and antibodies that bind to these polypeptides are provided. Also provided are vectors, host cells, and recombinant and synthetic methods for producing human polynucleotides and/or polypeptides, and antibodies. The invention further relates to diagnostic and therapeutic methods useful for diagnosing, treating, preventing and/or prognosing disorders related to these novel polypeptides. The invention further relates to screening methods for identifying agonists and antagonists of polynucleotides and polypeptides of the invention. The present invention further relates to methods and/or compositions for inhibiting or enhancing the production and function of the polypeptides of the present invention.

### BACKGROUND OF THE INVENTION

[0003] Protein transport is a quintessential process for both prokaryotic and eukaryotic cells. Transport of an individual protein usually occurs via an amino-terminal signal sequence, which directs, or targets, the protein from its ribosomal assembly site to a particular cellular or extracellular location. Transport may involve any combination of several of the following steps: contact with a chaperone, unfolding, interaction with a receptor and/or a pore complex, addition of energy, and refolding. Moreover, an extracellular protein may be produced as an inactive precursor. Once the precursor has been exported, removal of the signal sequence by a signal peptidase activates the protein.

[0004] Although amino-terminal signal sequences vary substantially, many patterns and overall properties are shared. Recently, hidden Markov models (HMMs), statistical alternatives to FASTA and Smith Waterman algorithms, have been used to find shared patterns, specifically consensus sequences (Pearson, W. R. and D. J. Lipman PNAS 85:2444-48 (1988); Smith, T. F. and M. S. Waterman J. Mol. Biol. 147:195-97 (1981)). Although they were initially developed to examine speech recognition patterns, HMMs have been used in biology to analyze protein and DNA sequences and to model protein structure (Krogh, A. et al. J. Mol. Biol. 235:1501-31 (1994); Collin, M. et al. Protein Sci. 2:305-14 (1993)). HMMs have a formal probabilistic basis and use position-specific scores for amino acids or nucleotides and for opening and extending an insertion or deletion. The algorithms are quite flexible in that they incorporate information from newly identified sequences to build even more successful patterns. Other methods exist to identify membrane associated proteins. Klein et al. have developed a method (“ALOM”, also called as KKD) to detect potential transmembrane segments in polypeptides (Klein, P. et al. Biochim. Biophys. Acta, 815:468 (1985)). It attempts to identify the most probable transmembrane segment from the average hydrophobicity value over a range of amino acid residues. It predicts whether the segment is a transmembrane segment (INTEGRAL) or not (PERIPHERAL) and thus, can suggest membrane association of a polypeptide.

[0005] Some examples of the protein families which are known to be plasma membrane associated are receptors (nuclear, 4 transmembrane, G protein coupled, and tyrosine kinase), cytokines (chemokines), hormones (growth and differentiation factors), neuropeptides and vasomediators, protein kinases, phosphatases, phospholipases, phosphodiesterases, nucleotide cyclases, matrix molecules (adhesion, cadherin, extracellular matrix molecules, integrin, and selectin), seven transmembrane receptors, ion channels (calcium, chloride, potassium, and sodium), proteases, transporter/pumps (amino acid, protein, sugar, metal and vitamin; calcium, phosphate, potassium, and sodium) and regulatory proteins. Descriptions of some of these proteins (seven transmembrane receptors, kinases, matrix proteins, fibronectins, defensins, EF-hand domain containing proteins, mac/perforin family members, pancreatic hormones, serine carboxypeptidases, tumor necrosis factors (TNFs)) and diseases associated with their dysfunction follow.

[0006] Seven Transmembrane Receptors-

[0007] The seven transmembrane receptors (also known as heptahelical, serpentine, or G protein-coupled receptors) comprise a superfamily of structurally related molecules. Possible relationships among seven transmembrane receptors (7TM receptors) for which amino acid sequence had previously been reported are reviewed in Probst et al., DNA and Cell Biology, 11(1):1-20 (1992). Briefly, the 7TM receptors exhibit detectable amino acid sequence similarity and all appear to share a number of structural characteristics including: an extracellular amino terminus; seven predominantly hydrophobic α-helical domains (of about 20-30 amino acids) which are believed to span the cell membrane and are referred to as transmembrane domains TM 1-7; approximately twenty well-conserved amino acids; and a cytoplasmic carboxy terminus.

[0008] Each 7TM receptor is predicted to associate with a particular G protein at the intracellular surface of the plasma membrane. The binding of the receptor to its ligand is thought to result in activation (i.e., the exchange of GTP for GDP on the α-subunit) of the G protein which in turn stimulates specific intracellular signal-transducing enzymes and channels. Thus, the function of each 7TM receptor is to discriminate its specific ligand from the complex extracellular milieu and then to activate G proteins to produce a specific intracellular signal. Transmembrane domain-3 (TM3) is believed to be essential in signal transduction (Cotecchia et al., Proc. Natl. Acad. Sci., USA, 87:2896-2900 (1990)). Other regions may be essential for biological activity as well (Lefkowitz, Nature, 265:603-604 (1993)).

[0009] Mutations in the third intracellular loop of one 7TM receptor (the thyrotropin receptor) and in the adjacent sixth transmembrane domain of another 7TM receptor (the luteinizing hormone receptor) have been reported to be the genetic defects responsible for an uncommon form of hyperthyroidism (Parma et al., Nature, 365:649-651 (1993) and for familial precocious puberty (Shenker et al., Nature, 365:652-654 (1993)), respectively. In both cases the mutations result in constitutive activation of the G protein receptors. Other studies have shown that mutations that prevent the activation of 7TM receptors are responsible for states of hormone resistance which are responsible for diseases such as congenital nephrogenic diabetes insipidus. See Rosenthal et al., J. Biol. Chem., 268:13030-13033 (1993). Still other studies have shown that several 7TM receptors can function as protooncogenes and be activated by mutational alteration. See, for example, Allen et al., Proc. Natl. Acad. Sci. USA, 88:11354-11358 (1991) which suggests that spontaneously occurring mutations in some 7TM receptors may alter the normal function of the receptors and result in uncontrolled cell growth associated with human disease states such as neoplasia and atherosclerosis. Therefore, mutations in 7TM receptors may underlie a number of human pathologies.

[0010] Kinases-

[0011] The kinases comprise the largest known group of proteins, a superfamily of enzymes with widely varied functions and specificities. Kinases regulate many different cell proliferation, differentiation, and signaling processes by adding phosphate groups to proteins. Receptor mediated extracellular events trigger the transfer of these high energy phosphate groups and activate intracellular signaling cascades. Activation is roughly analogous to the turning on a molecular switch, and in cases where signalling is uncontrolled, may be associated with or produce inflammation and cancer.

[0012] Almost all kinases contain a similar 250-300 amino acid catalytic domain. The N-terminal domain, which contains subdomains I-IV, generally folds into a two-lobed structure which binds and orients the ATP (or GTP) donor molecule. The larger C terminal lobe, which contains subdomains VIA-XI, binds the protein substrate and carries out the transfer of the gamma phosphate from ATP to the hydroxyl group of a serine, threonine, or tyrosine residue. Subdomain V spans the two lobes.

[0013] The kinases may be categorized into families by the different amino acid sequences (between 5 and 100 residues) located on either side of, or inserted into loops of, the kinase domain. These amino acid sequences allow the regulation of each kinase as it recognizes and interacts with its target protein. The primary structure of the kinase domain is conserved and contains specific residues and identifiable motifs or patterns of amino acids. The serine threonine kinases represent one family which preferentially phosphorylates serine or threonine residues. Many serine threonine kinases, including those from human, rabbit, rat, mouse, and chicken cells and tissues, have been described (Hardie, G. and Hanks, S. (1995) The Protein Kinase Facts Books, Vol 1:7-20 Academic Press, San Diego, Calif.).

[0014] Matrix Proteins-

[0015] The matrix proteins (MPs) provide structural support, cell and tissue identity, and autocrine, paracrine and juxtacrine properties for most eukaryotic cells (McGowan, S. E. (1992) FASEB J. 6:2895-2904). MPs include adhesion molecules, integrins and selectins, cadherins, lectins, lipocalins, and extracellular matrix proteins (ECMs). MPs possess many different domains which interact with soluble, extracellular molecules. These domains include collagen-like domains, EGF-like domains, immunoglobulin-like domains, fibronectin-like domains, type A domain of von Willebrand factor (vWFA)-like modules, ankyrin repeat modules, RDG or RDG-like sequences, carbohydrate-binding domains, and calcium-binding domains.

[0016] The diversity, distribution and biochemistry of MPs is indicative of their many, overlapping roles in cell proliferation and cell signaling. MPs function in the formation, growth, remodeling, and maintenance of bone, and in the mediation and regulation of inflammation. Biochemical changes that result from congenital, epigenetic, or infectious diseases affect the expression and balance of MPs. This balance, in turn, affects the activation, proliferation, differentiation, and migration of leukocytes and determines whether the immune response is appropriate or self-destructive (Roman, J. (1996) Immunol. Res. 15:163-178).

[0017] Fibronectins-

[0018] Fibronectin proteins play a vital role in the structure and function of the extracellular matrix (ECM). Defects in the function of the ECM are thought to be involved in diseases such as osteoporosis, atherosclerosis, arthritis, and fibrotic diseases. Fibronectin enables cells to adhere to the ECM, and influences the growth and migration of cells as well as the organization of the cytoskeleton. As a major component of the ECM, Fibronectin is thought to influence such processes as cellular adhesion and migration, particularly during development, as well as processes such as wound repair (R. O. Hynes, PNAS, 96:2588-90 (1999)).

[0019] Fibronectin is a disulfide-linked dimeric glycoprotein composed of type I, type II, and type III fibronectin repeats. Type I repeats are approximately 45 amino acids in length and are located at the amino- and carboxy-termini of the protein. Type II domains are approximately 40-60 amino acids in length, and contain four conserved cysteines involved in disulfide bonding. It is thought that the type II domains may function in collagen binding. There are approximately 15-17 type III domains, arranged in tandem in the middle of the protein, that are thought to provide elasticity to fibronectin.

[0020] Defensins-

[0021] Mammalian defensins are produced by the epidermis and mucosal epithelium as innate effector molecules thought to function in an antimicrobial capacity. Defensins are cytotoxic peptides with a broad range of activity on gram-positive and negative bacteria, fungi, parasites, viruses, and mycobacteria. The two characterized defensins are the alpha and beta defensins. The alpha-defensins are produced by neutrophils and macrophage, while the beta-defensins are produced by epithelia (Singh, P. K., et al., PNAS, 95:14961-66 (1998); Lillard, J. W., et al., PNAS, 96:651-56 (1999)).

[0022] Defensin peptides range in length from approximately 29 to 35 amino acids, and include six conserved cysteine residues involved in disulfide bond formation and protein folding. The distribution and connection of the cysteine residues differs between the alpha and beta defensins.

[0023] EF-hand Domain Containing Proteins-

[0024] Calcium is well known to be essential for cell signaling. However, calcium also plays a role in such cellular processes as protein processing and membrane traffic to and through the Golgi. Many proteins thought to be involved in the binding of calcium accomplish this in part through a protein calcium-binding domain known as the EF-hand domain.

[0025] The domain consists of a twelve residue loop flanked by a twelve residue alpha-helical domain on both sides. In the EF hand loop, the calcium ion is situated in a coordinated pentagonal bipyramidal configuration. An invariant Glutamic acid or Aspartic acid residue provides two oxygens for liganding the calcium ion.

[0026] Proteins containing this domain include aequorin and Renilla luciferin binding protein (LBP), Recoverins, Calmodulin, Calpain small and large chains, Calretinin, Calcyclin, Fimbrin, Serine/Threonine protein phosphatase, and Diacylglycerol kinase, for example.

[0027] MAC/Perforin Family Members-

[0028] The Membrane Attack Complex (MAC) is one of the sequentially activated, membrane bound complexes of the complement system used to eliminate diseased or non-compliant cells. Under this system, activated C5b sequentially binds C6 and C7, which insert into cell membranes. This complex then binds one molecule of C8, followed by between 1 and 18 molecules of C9, which polymerizes to generate a transmembrane channel. These transmembrane channels pierce the membrane, increasing the cell's permeability. These channels permit small molecules in the cell to exchange with the medium. Therefore, water is osmotically drawn into the cell, eventually resulting in the cell bursting.

[0029] Similarly, Perforin is a molecule produced by cytotoxic T cells. In the presence of calcium, Perforin polymerizes into transmembrane channels capable of lysing a variety of target cells in a nonspecific manner.

[0030] Pancreatic Hormones-Serine Carboxypeptidases-

[0031] Pancreatic hormone (PP) is a peptide of approximately 80 amino acids in length that is generated in pancreatic islets of Langherhans and consequently secreted. Pancreatic hormone is thought to function as a regulator of pancreatic and gastrointestinal functions.

[0032] Representative members of the pancreatic hormones family of proteins include Neuropeptide Y, Peptide YY, and skin peptide YY. These proteins may be useful as therapeutics for controlling secretion of the gonadotropin-releasing hormone, disorders related to feeding, vasoconstrictory actions, and colonic mobility, as well as antibacterial and antifungal activity.

[0033] Serine Carboxypeptidases-

[0034] Carboxypeptidases catalyze the hydrolysis of C-terminal residues of polypeptides. Carboxypeptidases are identified either as metallo-carboxypeptidases or serine-carboxypeptidases.

[0035] Serine carboxypeptidases have the ability to hydrolyze peptides as well as peptide amides from the C-terminus, and have a preferential release of a C-terminal arginine or lysine residue. Their subcellular location is usually extracellular or intracellular. The catalytic activity of serine carboxypeptidases is provided by a charge relay system involving an aspartic acid residue hydrogen-bonded to a histidine, which is itself hydrogen bonded to a serine.

[0036] Tumor Necrosis Factors (TNF)-

[0037] Tumor necrosis factors (TNF) alpha and beta are cytokines, which act through TNF receptors to regulate numerous biological processes, including protection against infection and induction of shock and inflammatory disease. The TNF molecules belong to the “TNF-ligand” superfamily, and act together with their receptors or counter-ligands, the “TNF-receptor” superfamily. So far, nine members of the TNF ligand superfamily have been identified and ten members of the TNF-receptor superfamily have been characterized.

[0038] Many members of the TNF-ligand superfamily are expressed by activated T-cells, implying that they are necessary for T-cell interactions with other cell types which underlie cell ontogeny and functions (Meager, A., supra).

[0039] Considerable insight into the essential functions of several members of the TNF receptor family has been gained from the identification and creation of mutants that abolish the expression of these proteins. For example, naturally occurring mutations in the FAS antigen and its ligand cause lymphoproliferative disease (Watanabe-Fukunaga, R. et al., Nature 356:314 (1992)), perhaps reflecting a failure of programmed cell death. Mutations of the CD40 ligand cause an X-linked immunodeficiency state characterized by high levels of immunoglobulin M and low levels of immunoglobulin G in plasma, indicating faulty T-cell-dependent B-cell activation (Allen, R. C. et al., Science 259:990 (1993)). Targeted mutations of the low affinity nerve growth factor receptor cause a disorder characterized by faulty sensory innovation of peripheral structures (Lee, K. F. et al, Cell 69:737 (1992)).

[0040] TNF and LT-α are capable of binding to two TNF receptors (the 55- and 75-kd TNF receptors). A large number of biological effects elicited by TNF and LT-α, acting through their receptors, include hemorrhagic necrosis of transplanted tumors, cytotoxicity, a role in endotoxic shock, inflammation, immunoregulation, proliferation and anti-viral responses, as well as protection against the deleterious effects of ionizing radiation. TNF and LT-α are involved in the pathogenesis of a wide range of diseases, including endotoxic shock, cerebral malaria, tumors, autoimmune disease, AIDS and graft-host rejection (Beutler, B. and Von Huffel, C., Science 264:667-668 (1994)). Mutations in the p55 Receptor cause increased susceptibility to microbial infection.

[0041] Moreover, an about 80 amino acid domain near the C-terminus of TNFR1 (p55) and Fas was reported as the “death domain,” which is responsible for transducing signals for programmed cell death (Tartaglia et al., Cell 74:845 (1993)).

[0042] Plasma membrane associated proteins with a predominant tissue expression pattern are important targets for targeted drug delivery, tumor-targeted therapy (e.g., including, but not limited to, radioimmunotherapy) antibody mediated attack of diseased tissues or cancers, and immune mediated cytotoxicity.

[0043] The discovery of new plasma membrane associated proteins and the polynucleotides encoding these molecules thus satisfies a need in the art by not only providing new compositions useful in the diagnosis, treatment, and prevention of diseases associated with cell proliferation and cell signaling, particularly cancer, immune response and neuronal disorders; but also by providing new targets for immune based therapies.

### SUMMARY OF THE INVENTION

[0044] The present invention relates to novel proteins. More specifically, isolated nucleic acid molecules are provided encoding novel polypeptides. Novel polypeptides and antibodies that bind to these polypeptides are provided. Also provided are vectors, host cells, and recombinant and synthetic methods for producing human polynucleotides and/or polypeptides, and antibodies. The invention further relates to diagnostic and therapeutic methods useful for diagnosing, treating, preventing and/or prognosing disorders related to these novel polypeptides. The invention further relates to screening methods for identifying agonists and antagonists of polynucleotides and polypeptides of the invention. The present invention further relates to methods and/or compositions for inhibiting or enhancing the production and function of the polypeptides of the present invention.

### DETAILED DESCRIPTION

[0045] Tables

[0046] Table 1A summarizes some of the polynucleotides encompassed by the invention (including cDNA clones related to the sequences (Clone ID NO:Z), contig sequences (contig identifier (Contig ID:) and contig nucleotide sequence identifier (SEQ ID NO:X)) and further summarizes certain characteristics of these polynucleotides and the polypeptides encoded thereby. The first column provides the gene number in the application for each clone identifier. The second column provides a unique clone identifier, “Clone ID NO:Z”, for a cDNA clone related to each contig sequence disclosed in Table 1A. The third column provides a unique contig identifier, “Contig ID:” for each of the contig sequences disclosed in Table 1A. The fourth column provides the sequence identifier, “SEQ ID NO:X”, for each of the contig sequences disclosed in Table 1A. The fifth column, “ORF (From-To)”, provides the location (i.e., nucleotide position numbers) within the polynucleotide sequence of SEQ ID NO:X that delineate the preferred open reading frame (ORF) that encodes the amino acid sequence shown in the sequence listing and referenced in Table 1A as SEQ ID NO:Y (column 6). Column 7 lists residues comprising predicted epitopes contained in the polypeptides encoded by each of the preferred ORFs (SEQ ID NO:Y). Identification of potential immunogenic regions was performed according to the method of Jameson and Wolf (CABIOS, 4; 181-186 (1988)); specifically, the Genetics Computer Group (GCG) implementation of this algorithm, embodied in the program PEPTIDESTRUCTURE (Wisconsin Package v10.0, Genetics Computer Group (GCG), Madison, Wis.). This method returns a measure of the probability that a given residue is found on the surface of the protein. Regions where the antigenic index score is greater than 0.9 over at least 6 amino acids are indicated in Table 1A as “Predicted Epitopes”. In particular embodiments, polypeptides of the invention comprise, or alternatively consist of, one, two, three, four, five or more of the predicted epitopes described in Table 1A. It will be appreciated that depending on the analytical criteria used to predict antigenic determinants, the exact address of the determinant may vary slightly. Column 8, “Tissue Distribution” shows the expression profile of tissue, cells, and/or cell line libraries which express the polynucleotides of the invention. The first number in column 8 (preceding the colon), represents the tissue/cell source identifier code corresponding to the key provided in Table 4. Expression of these polynucleotides was not observed in the other tissues and/or cell libraries tested. For those identifier codes in which the first two letters are not “AR”, the second number in column 8 (following the colon), represents the number of times a sequence corresponding to the reference polynucleotide sequence (e.g., SEQ ID NO:X) was identified in the tissue/cell source. Those tissue/cell source identifier codes in which the first two letters are “AR” designate information generated using DNA array technology. Utilizing this technology, cDNAs were amplified by PCR and then transferred, in duplicate, onto the array. Gene expression was assayed through hybridization of first strand cDNA probes to the DNA array. cDNA probes were generated from total RNA extracted from a variety of different tissues and cell lines. Probe synthesis was performed in the presence of ³³P dCTP, using oligo(dT) to prime reverse transcription. After hybridization, high stringency washing conditions were employed to remove non-specific hybrids from the array. The remaining signal, emanating from each gene target, was measured using a Phosphorimager. Gene expression was reported as Phosphor Stimulating Luminescence (PSL) which reflects the level of phosphor signal generated from the probe hybridized to each of the gene targets represented on the array. A local background signal subtraction was performed before the total signal generated from each array was used to normalize gene expression between the different hybridizations. The value presented after “[array code]:” represents the mean of the duplicate values, following background subtraction and probe normalization. One of skill in the art could routinely use this information to identify normal and/or diseased tissue(s) which show a predominant expression pattern of the corresponding polynucleotide of the invention or to identify polynucleotides which show predominant and/or specific tissue and/or cell expression. Column 9 provides the chromosomal location of polynucleotides corresponding to SEQ ID NO:X. Chromosomal location was determined by finding exact matches to EST and cDNA sequences contained in the NCBI (National Center for Biotechnology Information) UniGene database. Given a presumptive chromosomal location, disease locus association was determined by comparison with the Morbid Map, derived from Online Mendelian Inheritance in Man (Online Mendelian Inheritance in Man, OMIMTM. McKusick-Nathans Institute for Genetic Medicine, Johns Hopkins University (Baltimore, Md.) and National Center for Biotechnology Information, National Library of Medicine (Bethesda, Md.) 2000. World Wide Web URL: http://www.ncbi.nlm.nih.gov/omim/). If the putative chromosomal location of the Query overlaps with the chromosomal location of a Morbid Map entry, an OMIM identification number is disclosed in column 10 labeled “OMIM Disease Reference(s)”. A key to the OMIM reference identification numbers is provided in Table 5. Column 11 provides the amino acid position of the ALOM hit(s) predicted for the amino acid sequence shown in SEQ ID NO:Y.

[0047] Table 1B summarizes additional polynucleotides encompassed by the invention (including cDNA clones related to the sequences (Clone ID NO:Z), contig sequences (contig identifier (Contig ID:) contig nucleotide sequence identifiers (SEQ ID NO:X)), and genomic sequences (SEQ ID NO:B). The first column provides a unique clone identifier, “Clone ID NO:Z”, for a cDNA clone related to each contig sequence. The second column provides the sequence identifier, “SEQ ID NO:X”, for each contig sequence. The third column provides a unique contig identifier, “Contig ID:” for each contig sequence. The fourth column, provides a BAC identifier “BAC ID NO:A” for the BAC clone referenced in the corresponding row of the table. The fifth column provides the nucleotide sequence identifier, “SEQ ID NO:B” for a fragment of the BAC clone identified in column four of the corresponding row of the table. The sixth column, “Exon From-To”, provides the location (i.e., nucleotide position numbers) within the polynucleotide sequence of SEQ ID NO:B which delineate certain polynucleotides of the invention that are also exemplary members of polynucleotide sequences that encode polypeptides of the invention (e.g., polypeptides containing amino acid sequences encoded by the polynucleotide sequences delineated in column six, and fragments and variants thereof).

[0048] Table 2 summarizes homology and features of some of the polypeptides of the invention. The first column provides a unique clone identifier, “Clone ID NO:Z”, corresponding to a cDNA clone disclosed in Table 1A. The second column provides the unique contig identifier, “Contig ID:” corresponding to contigs in Table 1A and allowing for correlation with the information in Table 1A. The third column provides the sequence identifier, “SEQ ID NO:X”, for the contig polynucleotide sequence. The fourth column provides the analysis method by which the homology/identity disclosed in the Table was determined. Comparisons were made between polypeptides encoded by the polynucleotides of the invention and either a non-redundant protein database (herein referred to as “NR”), or a database of protein families (herein referred to as “PFAM”) as further described below. The fifth column provides a description of the PFAM/NR hit having a significant match to a polypeptide of the invention. Column six provides the accession number of the PFAM/NR hit disclosed in the fifth column. Column seven, “Score/Percent Identity”, provides a quality score or the percent identity, of the hit disclosed in columns five and six. Columns 8 and 9, “NT From” and “NT To” respectively, delineate the polynucleotides in “SEQ ID NO:X” that encode a polypeptide having a significant match to the PFAM/NR database as disclosed in the fifth and sixth columns. In specific embodiments polypeptides of the invention comprise, or alternatively consist of, an amino acid sequence encoded by a polynucleotide in SEQ ID NO:X as delineated in columns 8 and 9, or fragments or variants thereof.

[0049] Table 3 provides polynucleotide sequences that may be disclaimed according to certain embodiments of the invention. The first column provides a unique clone identifier, “Clone ID”, for a cDNA clone related to contig sequences disclosed in Table 1A. The second column provides the sequence identifier, “SEQ ID NO:X”, for contig sequences disclosed in Table 1A. The third column provides the unique contig identifier, “Contig ID:”, for contigs disclosed in Table 1A. The fourth column provides a unique integer ‘a’ where ‘a’ is any integer between 1 and the final nucleotide minus 15 of SEQ ID NO:X, and the fifth column provides a unique integer ‘b’ where ‘b’ is any integer between 15 and the final nucleotide of SEQ ID NO:X, where both a and b correspond to the positions of nucleotide residues shown in SEQ ID NO:X, and where b is greater than or equal to a +14. For each of the polynucleotides shown as SEQ ID NO:X, the uniquely defined integers can be substituted into the general formula of a-b, and used to describe polynucleotides which may be preferably excluded from the invention. In certain embodiments, preferably excluded from the invention are at least one, two, three, four, five, ten, or more of the polynucleotide sequence(s) having the accession number(s) disclosed in the sixth column of this Table (including for example, published sequence in connection with a particular BAC clone). In further embodiments, preferably excluded from the invention are the specific polynucleotide sequence(s) contained in the clones corresponding to at least one, two, three, four, five, ten, or more of the available material having the accession numbers identified in the sixth column of this Table (including for example, the actual sequence contained in an identified BAC clone).

[0050] Table 4 provides a key to the tissue/cell source identifier code disclosed in Table 1A, column 8. Column 1 provides the tissue/cell source identifier code disclosed in Table 1A, Column 8. Columns 2-5 provide a description of the tissue or cell source. Codes corresponding to diseased tissues are indicated in column 6 with the word “disease”. The use of the word “disease” in column 6 is non-limiting. The tissue or cell source may be specific (e.g. a neoplasm), or may be disease-associated (e.g., a tissue sample from a normal portion of a diseased organ). Furthermore, tissues and/or cells lacking the “disease” designation may still be derived from sources directly or indirectly involved in a disease state or disorder, and therefore may have a further utility in that disease state or disorder. In numerous cases where the tissue/cell source is a library, column 7 identifies the vector used to generate the library.

[0051] Table 5 provides a key to the OMIM reference identification numbers disclosed in Table 1A, column 10. OMIM reference identification numbers (Column 1) were derived from Online Mendelian Inheritance in Man (Online Mendelian Inheritance in Man, OMIM. McKusick-Nathans Institute for Genetic Medicine, Johns Hopkins University (Baltimore, Md.) and National Center for Biotechnology Information, National Library of Medicine, (Bethesda, Md.) 2000. World Wide Web URL: http://www.ncbi.nlm.nih.gov/omim/). Column 2 provides diseases associated with the cytologic band disclosed in Table 1A, column 9, as determined using the Morbid Map database.

[0052] Table 6 summarizes ATCC Deposits, Deposit dates, and ATCC designation numbers of deposits made with the ATCC in connection with the present application.

[0053] Table 7 shows the cDNA libraries sequenced, and ATCC designation numbers and vector information relating to these cDNA libraries.

[0054] Table 8 provides a physical characterization of clones encompassed by the invention. The first column provides the unique clone identifier, “Clone ID NO:Z”, for certain cDNA clones of the invention, as described in Table 1A. The second column provides the size of the cDNA insert contained in the corresponding cDNA clone.

[0055] Definitions

[0056] The following definitions are provided to facilitate understanding of certain terms used throughout this specification.

[0057] In the present invention, “isolated” refers to material removed from its original environment (e.g., the natural environment if it is naturally occurring), and thus is altered “by the hand of man” from its natural state. For example, an isolated polynucleotide could be part of a vector or a composition of matter, or could be contained within a cell, and still be “isolated” because that vector, composition of matter, or particular cell is not the original environment of the polynucleotide. The term “isolated” does not refer to genomic or cDNA libraries, whole cell total or mRNA preparations, genomic DNA preparations (including those separated by electrophoresis and transferred onto blots), sheared whole cell genomic DNA preparations or other compositions where the art demonstrates no distinguishing features of the polynucleotide/sequences of the present invention.

[0058] As used herein, a “polynucleotide” refers to a molecule having a nucleic acid sequence encoding SEQ ID NO:Y or a fragment or variant thereof; a nucleic acid sequence contained in SEQ ID NO:X (as described in column 3 of Table 1A) or the complement thereof; a cDNA sequence contained in Clone ID NO:Z (as described in column 2 of Table IA and contained within a library deposited with the ATCC); a nucleotide sequence encoding the polypeptide encoded by a nucleotide sequence in SEQ ID NO:B as defined in column 6 of Table 1B or a fragment or variant thereof; or a nucleotide coding sequence in SEQ ID NO:B as defined in column 6 of Table 1B or the complement thereof. For example, the polynucleotide can contain the nucleotide sequence of the full length cDNA sequence, including the 5′ and 3′ untranslated sequences, the coding region, as well as fragments, epitopes, domains, and variants of the nucleic acid sequence. Moreover, as used herein, a “polypeptide” refers to a molecule having an amino acid sequence encoded by a polynucleotide of the invention as broadly defined (obviously excluding poly-Phenylalanine or poly-Lysine peptide sequences which result from translation of a polyA tail of a sequence corresponding to a cDNA).

[0059] In the present invention, “SEQ ID NO:X” was often generated by overlapping sequences contained in multiple clones (contig analysis). A representative clone containing all or most of the sequence for SEQ ID NO:X is deposited at Human Genome Sciences, Inc. (HGS) in a catalogued and archived library. As shown, for example, in column 2 of Table 1A, each clone is identified by a cDNA Clone ID (identifier generally referred to herein as Clone ID NO:Z). Each Clone ID is unique to an individual clone and the Clone ID is all the information needed to retrieve a given clone from the HGS library. Furthermore, the clones disclosed in this application have been deposited with the ATCC on Mar. 24, 2000, having the ATCC designation number PTA-1559 and on Oct. 5, 2000, having the ATCC designation numbers PTA 2574 and PTA 2575; and on Jan. 5, 2001, having the ATCC designation numbers PTA-2874, PTA-2875, PTA-2876, and PTA-2877. In addition to the individual cDNA clone deposits, most of the cDNA libraries from which the clones were derived were deposited at the American Type Culture Collection (hereinafter “ATCC”). Table 7 provides a list of the deposited cDNA libraries. One can use the Clone ID NO:Z to determine the library source by reference to Tables 6 and 7. Table 7 lists the deposited cDNA libraries by name and links each library to an ATCC Deposit. Library names contain four characters, for example, “HTWE.” The name of a cDNA clone (Clone ID) isolated from that library begins with the same four characters, for example “HTWEP07”. As mentioned below, Table 1A correlates the Clone ID names with SEQ ID NO:X. Thus, starting with an SEQ ID NO:X, one can use Tables 1A, 6 and 7 to determine the corresponding Clone ID, which library it came from and which ATCC deposit the library is contained in. Furthermore, it is possible to retrieve a given cDNA clone from the source library by techniques known in the art and described elsewhere herein. The ATCC is located at 10801 University Boulevard, Manassas, Va. 20110⁻²²⁰⁹, USA. The ATCC deposits were made pursuant to the terms of the Budapest Treaty on the international recognition of the deposit of microorganisms for the purposes of patent procedure.

[0060] In specific embodiments, the polynucleotides of the invention are at least 15, at least 30, at least 50, at least 100, at least 125, at least 500, or at least 1000 continuous nucleotides but are less than or equal to 300 kb, 200 kb, 100 kb, 50 kb, 15 kb, 10 kb, 7.5kb, 5 kb, 2.5 kb, 2.0 kb, or 1 kb, in length. In a further embodiment, polynucleotides of the invention comprise a portion of the coding sequences, as disclosed herein, but do not comprise all or a portion of any intron. In another embodiment, the polynucleotides comprising coding sequences do not contain coding sequences of a genomic flanking gene (i.e., 5′ or 3′ to the gene of interest in the genome). In other embodiments, the polynucleotides of the invention do not contain the coding sequence of more than 1000, 500, 250, 100, 50, 25, 20, 15, 10, 5, 4, 3, 2, or 1 genomic flanking gene(s).

[0061] A “polynucleotide” of the present invention also includes those polynucleotides capable of hybridizing, under stringent hybridization conditions, to sequences contained in SEQ ID NO:X, or the complement thereof (e.g., the complement of any one, two, three, four, or more of the polynucleotide fragments described herein), the polynucleotide sequence delineated in columns 8 and 9 of Table 2 or the complement thereof, and/or cDNA sequences contained in Clone ID NO:Z (e.g., the complement of any one, two, three, four, or more of the polynucleotide fragments, or the cDNA clone within the pool of cDNA clones deposited with the ATCC, described herein), and/or the polynucleotide sequence delineated in column 6 of Table 1B or the complement thereof. “Stringent hybridization conditions” refers to an overnight incubation at 42 degree C. in a solution comprising 50% formamide, 5× SSC (750 mM NaCl, 75 mM trisodium citrate), 50 mM sodium phosphate (pH 7.6), 5× Denhardt's solution, 10% dextran sulfate, and 20 μg/ml denatured, sheared salmon sperm DNA, followed by washing the filters in 0.1× SSC at about 65 degree C.

[0062] Also contemplated are nucleic acid molecules that hybridize to the polynucleotides of the present invention at lower stringency hybridization conditions. Changes in the stringency of hybridization and signal detection are primarily accomplished through the manipulation of formamide concentration (lower percentages of formamide result in lowered stringency); salt conditions, or temperature. For example, lower stringency conditions include an overnight incubation at 37 degree C. in a solution comprising 6× SSPE (20× SSPE=3M NaCl; 0.2M NaH₂PO₄; 0.02M EDTA, pH 7.4), 0.5% SDS, 30% formamide, 100 ug/ml salmon sperm blocking DNA; followed by washes at 50 degree C. with 1× SSPE, 0.1% SDS. In addition, to achieve even lower stringency, washes performed following stringent hybridization can be done at higher salt concentrations (e.g. 5× SSC).

[0063] Note that variations in the above conditions may be accomplished through the inclusion and/or substitution of alternate blocking reagents used to suppress background in hybridization experiments. Typical blocking reagents include Denhardt's reagent, BLOTTO, heparin, denatured salmon sperm DNA, and commercially available proprietary formulations. The inclusion of specific blocking reagents may require modification of the hybridization conditions described above, due to problems with compatibility.

[0064] Of course, a polynucleotide which hybridizes only to polyA+ sequences (such as any 3′ terminal polyA+ tract of a cDNA shown in the sequence listing), or to a complementary stretch of T (or U) residues, would not be included in the definition of “polynucleotide,” since such a polynucleotide would hybridize to any nucleic acid molecule containing a poly (A) stretch or the complement thereof (e.g., practically any double-stranded cDNA clone generated using oligo dT as a primer).

[0065] The polynucleotide of the present invention can be composed of any polyribonucleotide or polydeoxribonucleotide, which may be unmodified RNA or DNA or modified RNA or DNA. For example, polynucleotides can be composed of single- and double-stranded DNA, DNA that is a mixture of single- and double-stranded regions, single- and double-stranded RNA, and RNA that is mixture of single- and double-stranded regions, hybrid molecules comprising DNA and RNA that may be single-stranded or, more typically, double-stranded or a mixture of single- and double-stranded regions. In addition, the polynucleotide can be composed of triple-stranded regions comprising RNA or DNA or both RNA and DNA. A polynucleotide may also contain one or more modified bases or DNA or RNA backbones modified for stability or for other reasons. “Modified” bases include, for example, tritylated bases and unusual bases such as inosine. A variety of modifications can be made to DNA and RNA; thus, “polynucleotide” embraces chemically, enzymatically, or metabolically modified forms.

[0066] The polypeptide of the present invention can be composed of amino acids joined to each other by peptide bonds or modified peptide bonds, i.e., peptide isosteres, and may contain amino acids other than the 20 gene-encoded amino acids. The polypeptides may be modified by either natural processes, such as posttranslational processing, or by chemical modification techniques which are well known in the art. Such modifications are well described in basic texts and in more detailed monographs, as well as in a voluminous research literature. Modifications can occur anywhere in a polypeptide, including the peptide backbone, the amino acid side-chains and the amino or carboxyl termini. It will be appreciated that the same type of modification may be present in the same or varying degrees at several sites in a given polypeptide. Also, a given polypeptide may contain many types of modifications. Polypeptides may be branched, for example, as a result of ubiquitination, and they may be cyclic, with or without branching. Cyclic, branched, and branched cyclic polypeptides may result from posttranslation natural processes or may be made by synthetic methods. Modifications include acetylation, acylation, ADP-ribosylation, amidation, covalent attachment of flavin, covalent attachment of a heme moiety, covalent attachment of a nucleotide or nucleotide derivative, covalent attachment of a lipid or lipid derivative, covalent attachment of phosphotidylinositol, cross-linking, cyclization, disulfide bond formation, demethylation, formation of covalent cross-links, formation of cysteine, formation of pyroglutamate, formylation, gamma-carboxylation, glycosylation, GPI anchor formation, hydroxylation, iodination, methylation, myristoylation, oxidation, pegylation, proteolytic processing, phosphorylation, prenylation, racemization, selenoylation, sulfation, transfer-RNA mediated addition of amino acids to proteins such as arginylation, and ubiquitination. (See, for instance, PROTEINS—STRUCTURE AND MOLECULAR PROPERTIES, 2nd Ed., T. E. Creighton, W. H. Freeman and Company, New York (1993); POSTTRANSLATIONAL COVALENT MODIFICATION OF PROTEINS, B. C. Johnson, Ed., Academic Press, New York, pgs. 1-12 (1983); Seifter et al., Meth. Enzymol. 182:626-646 (1990); Rattan et al., Ann. N.Y. Acad. Sci. 663:48-62 (1992)).

[0067] “SEQ ID NO:X” refers to a polynucleotide sequence described, for example, in Tables 1A or 2, while “SEQ ID NO:Y” refers to a polypeptide sequence described in column 6 of Table 1A. SEQ ID NO:X is identified by an integer specified in column 4 of Table 1A. The polypeptide sequence SEQ ID NO:Y is a translated open reading frame (ORF) encoded by polynucleotide SEQ ID NO:X. “Clone ID NO:Z” refers to a cDNA clone described in column 2 of Table 1A.

[0068] “A polypeptide having functional activity” refers to a polypeptide capable of displaying one or more known functional activities associated with a full-length (complete) protein. Such functional activities include, but are not limited to, biological activity, antigenicity [ability to bind (or compete with a polypeptide for binding) to an anti-polypeptide antibody], immunogenicity (ability to generate antibody which binds to a specific polypeptide of the invention), ability to form multimers with polypeptides of the invention, and ability to bind to a receptor or ligand for a polypeptide.

[0069] The polypeptides of the invention can be assayed for functional activity (e.g. biological activity) using or routinely modifying assays known in the art, as well as assays described herein. Specifically, one of skill in the art may routinely assay polypeptides (including fragments and variants) of the invention for activity using assays as described in the Examples.

[0070] “A polypeptide having biological activity” refers to a polypeptide exhibiting activity similar to, but not necessarily identical to, an activity of a polypeptide of the present invention, including mature forms, as measured in a particular biological assay, with or without dose dependency. In the case where dose dependency does exist, it need not be identical to that of the polypeptide, but rather substantially similar to the dose-dependence in a given activity as compared to the polypeptide of the present invention (i.e., the candidate polypeptide will exhibit greater activity or not more than about 25-fold less and, preferably, not more than about tenfold less activity, and most preferably, not more than about three-fold less activity relative to the polypeptide of the present invention).

[0071] Table 1A summarizes some of the polynucleotides encompassed by the invention (including contig sequences (SEQ ID NO:X) and clones (Clone ID NO:Z) and further summarizes certain characteristics of these polynucleotides and the polypeptides encoded thereby.

[0072] Polynucleotides and Polypeptides of the Invention

[0073] It has been discovered herein that the polynucleotides described in Table 1A are predicted to be localized to the plasma membrane of human cells. Accordingly, such polynucleotides, polypeptides encoded by such polynucleotides, and antibodies specific for such polypeptides find use in the diagnosis, treatment, and prevention of diseases associated with cell proliferation and cell signaling, particularly cancer, immune response and neuronal disorders.

[0074] Plasma membrane localization was predicted using the following method. All novel contigs in the HGS database were scored using the ALOM program developed by Klein et al. to detect potential transmembrane segments (Klein, P. et al. Biochim. Biophys. Acta 815:468 (1985); which is hereby incorporated by reference in its entirety herein). ALOM attempts to identify the most probable transmembrane segment from the average hydrophobicity value of 17-residue segments, if any. It predicts whether the segment is a transmembrane segment (INTEGRAL) or not (PERIPHERAL) comparing the discriminant score (reported as ‘value’) with a threshold parameter pre-defined to 0.0 for bacteria (‘threshold’). For an integral membrane protein, position(s) of transmembrane segment(s) are also reported. Their length is fixed to 17 but their extension, i.e., the maximal range that satisfies the discriminant criterion, is also given in parentheses. The discrimination step mentioned above is continued after leaving out the segment till there remains no predicted transmembrane segment. The item ‘count’ is the number of predicted transmembrane segments.

[0075] The protein sequence used was the longest start-codon to stop-codon (or end of sequence) ORF. If the ORF was at least 100 amino acids long, and there was a predicted INTEGRAL membrane domain starting at least 40 amino acids downstream of the start Met, the contig was selected as encoding a plasma-membrane-associated protein. The polynucleotides of the invention are predicted to be plasma membrane associated and comprise the predicted INTEGRAL membrane domains for each unique contig ID shown in column 11 of Table 1A.

TABLE 1A

| | | | | | AA | | Tissue Distribution | | OMIM | |
|---|---|---|---|---|---|---|---|---|---|---|
| | | | SEQ | ORF | SEQ | | Library code: count | | Disease | |
| Gene | Clone ID | Contig | ID | (From- | ID | | (see Table IV for | Cytologic | Refer- | ALOM |
| No: | NO: Z | ID: | NO: X | To) | NO: Y | Predicted Epitopes | Library Codes) | Band | ence(s): | Result |
| 1 | H7TBC95 | 865922 | 11 | 3-704 | 80 | Gln-154 to Ser-163. | AR089: 1, AR061: 1 | | | 130-153, |
| | | | | | | | S0198: 57, S0274: 12, | | | 38-59, 79- |
| | | | | | | | S0252: 4, S0270: 3, | | | 102, 164 |
| | | | | | | | S0264: 1, S0268: 1 and | | | 181, 184 |
| | | | | | | | S0228: 1. | | | 200, 63-79 |
| 2 | HACCH94 | 847143 | 12 | 1-897 | 81 | Gly-1 to Ser-6, | AR061: 4, AR089: 2 | | | 131-160, |
| | | | | | | Arg-76 to Gln-88, | L0754: 6, L0766: 3, | | | 87-112, |
| | | | | | | Lys-113 to Ser-119, | L0731: 2, H0624: 1, | | | 180-205, |
| | | | | | | Tyr-125 to Lys-132, | H0170: 1, S0116: 1, | | | 46-63, |
| | | | | | | Ser-167 to Tyr-179, | S0280: 1, H0545: 1, | | | 230-246. |
| | | | | | | Arg-263 to Tyr-281, | T0006: 1, S0344: 1, | | | |
| | | | | | | Ser-294 to Thr-299. | S0426: 1, L0770: 1, | | | |
| | | | | | | | L0790: 1, L0748: 1, | | | |
| | | | | | | | L0756: 1, L0779: 1, | | | |
| | | | | | | | L0589: 1 and L0462: 1. | | | |
| 3 | HAIBU93 | 907830 | 13 | 1-1851 | 82 | Pro-13 to Pro-18, | AR089: 8, AR06 1: 5 | | | 235-265, |
| | | | | | | Pro-24 to Leu-32, | L0758: 12, H0556: 8, | | | 284-353, |
| | | | | | | Glu-51 to His-59, | L0748: 7, H0599: 6, | | | 316-332, |
| | | | | | | Leu-83 to Trp-91, | L0769: 6, L0439: 6, | | | 397-413. |
| | | | | | | Thr-113 to Gln-120, | L0747: 6, S0360: 5, | | | |
| | | | | | | Pro-133 to Asp-138, | H0271: 5, L0770: 4, | | | |
| | | | | | | Arg-141 to Gln-146, | L0766: 4, L0775: 4, | | | |
| | | | | | | Arg-151 to Ser-156, | H0265: 3, S0132: 3, | | | |
| | | | | | | Tyr-160 to Cys-175, | S0222: 3, H0620: 3, | | | |
| | | | | | | Asn-183 to Asn-188, | H0038: 3, H0412: 3, | | | |
| | | | | | | Trp-221 to Lys-231, | L0659: 3, L0438: 3, | | | |
| | | | | | | Ser-271 to Arg-283, | L0759: 3, H0663: 2, | | | |
| | | | | | | Phe-345 to Gly-350, | H0664: 2, S0420: 2, | | | |
| | | | | | | Ser-381 to Asp-386, | S0376: 2, H0597: 2, | | | |
| | | | | | | Gly-417 to Ser-422, | L0471: 2, H0012: 2, | | | |
| | | | | | | Tyr-462 to Asn-471, | S0388: 2, H0416: 2, | | | |
| | | | | | | Glu-505 to Leu-533, | H0617: 2, H0068: 2, | | | |
| | | | | | | Ser-555 to Asp-561, | H0646: 2, L0646: 2, | | | |
| | | | | | | Thr-566 to His-576, | L0662: 2, L0776: 2, | | | |
| | | | | | | Ser-582 to Gln-587. | H0144: 2, L0352: 2, | | | |
| | | | | | | | H0659: 2, H0518: 2, | | | |
| | | | | | | | S0404: 2, H0555: 2, | | | |
| | | | | | | | L0744: 2, L0779: 2, | | | |
| | | | | | | | L0777: 2, L0757: 2, | | | |
| | | | | | | | S0434: 2, L0596: 2, | | | |
| | | | | | | | H0542: 2, H0543: 2, | | | |
| | | | | | | | S0134: 1, S0356: 1, | | | |
| | | | | | | | S0358: 1, S0046: 1, | | | |
| | | | | | | | L0717: 1, H0351: 1, | | | |
| | | | | | | | H0369: 1, H0392: 1, | | | |
| | | | | | | | L0623: 1, H0486: 1, | | | |
| | | | | | | | S0280: 1, L0021: 1, | | | |
| | | | | | | | T0048: 1, H0318: 1, | | | |
| | | | | | | | S0049: 1, H0052: 1, | | | |
| | | | | | | | H0194: 1, H0231: 1, | | | |
| | | | | | | | L0738: 1, H0327: 1, | | | |
| | | | | | | | H0178: 1, H0024: 1, | | | |
| | | | | | | | H0320: 1, H0107: 1, | | | |
| | | | | | | | S6028: 1, H0266: 1, | | | |
| | | | | | | | H0030: 1, H0031: 1, | | | |
| | | | | | | | H0644: 1, H0181: 1, | | | |
| | | | | | | | H0182: 1, H0606: 1, | | | |
| | | | | | | | H0673: 1, L0455: 1, | | | |
| | | | | | | | H0135: 1, H0591: 1, | | | |
| | | | | | | | H0634: 1, H0616: 1, | | | |
| | | | | | | | H0087: 1, S0038: 1, | | | |
| | | | | | | | L0351: 1, H0494: 1, | | | |
| | | | | | | | H0561: 1, S0142: 1, | | | |
| | | | | | | | S0344: 1, S0002: 1, | | | |
| | | | | | | | L0369: 1, L0640: 1, | | | |
| | | | | | | | L0371: 1, L0761: 1, | | | |
| | | | | | | | L0667: 1, L0372: 1, | | | |
| | | | | | | | L0764: 1, L0648: 1, | | | |
| | | | | | | | L0768: 1, L0794: 1, | | | |
| | | | | | | | L0774: 1, L0655: 1, | | | |
| | | | | | | | L0656: 1, L0517: 1, | | | |
| | | | | | | | L0788: 1, L0666: 1, | | | |
| | | | | | | | L0664: 1, S0428: 1, | | | |
| | | | | | | | S0374: 1, T0068: 1, | | | |
| | | | | | | | H0519: 1, H0682: 1, | | | |
| | | | | | | | H0684: 1, H0658: 1, | | | |
| | | | | | | | H0539: 1, S0380: 1, | | | |
| | | | | | | | S0152: 1, H0521: 1, | | | |
| | | | | | | | L0751: 1, L0745: 1, | | | |
| | | | | | | | L0749: 1, L0756: 1, | | | |
| | | | | | | | L0755: 1, L0731: 1, | | | |
| | | | | | | | H0445: 1, L0599: 1, | | | |
| | | | | | | | H0423: 1, H0422: 1, | | | |
| | | | | | | | H0677: 1 and H0008: 1. | | | |
| 4 | HAMAC79 | 872774 | 14 | 337- | 83 | | AR089: 20, AR061: 13 | | | 71-87, |
| | | | | 867 | | | H0122: 1 | | | 150-166. |
| 5 | HBCMD49 | 865314 | 15 | 2-619 | 84 | Arg-1 to Leu-6, | AR061: 1, AR089: 0 | | | 146-162. |
| | | | | | | Pro-47 to Arg-52. | L0774: 3, H0068: 2, | | | |
| | | | | | | | L0622: 1, H0119: 1, | | | |
| | | | | | | | H0509: 1, L0775: 1, | | | |
| | | | | | | | L0776: 1, L0666: 1, | | | |
| | | | | | | | S0028: 1, L0758: 1, | | | |
| | | | | | | | S0260: 1 and S0396: 1. | | | |
| 6 | HBXAN27 | 823467 | 16 | 12-395 | 85 | | AR061: 0, AR089: 0 | | | 81-99. |
| | | | | | | | S0038: 2 | | | |
| 7 | HBXCM38 | 910086 | 17 | 402- | 86 | Val-36 to Glu-43, | AR061: 2, AR089: 1 | | | 118-134. |
| | | | | 1535 | | Lys-66 to Glu-71. | L0439: 6, S0038: 3, | | | |
| | | | | | | | L0803: 3, H0455: 2, | | | |
| | | | | | | | L0769: 2, L0809: 2, | | | |
| | | | | | | | L0741: 2, L0756: 2, | | | |
| | | | | | | | S6024: 1, S0001: 1, | | | |
| | | | | | | | H0663: 1, S0222: 1, | | | |
| | | | | | | | H0441: 1, H0438: 1, | | | |
| | | | | | | | H0036: 1, S0049: 1, | | | |
| | | | | | | | H0309: 1, H0566: 1, | | | |
| | | | | | | | H0024: 1, S0388: 1, | | | |
| | | | | | | | S0051: 1, T0010: 1, | | | |
| | | | | | | | H0059: 1, L0645: 1, | | | |
| | | | | | | | L0774: 1, L0790: 1, | | | |
| | | | | | | | L0663: 1, L0665: 1, | | | |
| | | | | | | | H0345: 1, L0742: 1, | | | |
| | | | | | | | L0748: 1, L0749: 1, | | | |
| | | | | | | | H0707: 1, L0595: 1 and | | | |
| | | | | | | | L0366: 1. | | | |
| 8 | HCEEI37 | 530915 | 18 | 1-465 | 87 | | AR061: 9, AR089: 6 | | | 83-101 |
| | | | | | | | H0052: 2 and L0439: 1. | | | |
| 9 | HCEPH84 | 910864 | 19 | 1689- | 88 | Ser-65 to Gly-75, | AR089: 1, AR061: 1 | | | |
| | | | | 706 | | Thr-84 to Ser-89. | L0439: 6, L0745: 5, | | | |
| | | | | | | | H0052: 4, L0438: 4, | | | |
| | | | | | | | L0592: 3, L0604: 3, | | | |
| | | | | | | | H0009: 2, S0001: 1, | | | |
| | | | | | | | H0599: 1, H0196: 1, | | | |
| | | | | | | | H0172: 1, T0010: 1, | | | |
| | | | | | | | S0364: 1, S0366: 1, | | | |
| | | | | | | | S0038: 1, L0789: 1, | | | |
| | | | | | | | H0144: 1, S0044: 1, | | | |
| | | | | | | | L0747: 1, L0759: 1 and | | | |
| | | | | | | | L0605: 1. | | | |
| 10 | HCWFP47 | 849893 | 20 | 1-411 | 89 | Ser-47 to Ser-78. | AR089: 2, AR061: 0 | | | |
| | | | | | | | H0305: 3 | | | |
| 11 | HCWTB56 | 853009 | 21 | 2-346 | 90 | | AR061: 5, AAR089: 4 | | | 52-87, 79- |
| | | | | | | | H0305: 2 and H0589: 1. | | | 97, 16-32. |
| 12 | HDPIT61 | 741724 | 22 | 1-420 | 91 | Glu-1 to Arg-33, | AR089: 1, AR061: 0 | | | |
| | | | | | | Gly-45 to Pro-52, | H0521: 1 and H0522. 1. | | | |
| | | | | | | Pro-62 to Ser-71, | | | | |
| | | | | | | Pro-83 to Trp-95. | | | | |
| 13 | HDPMA48 | 582015 | 23 | 2-706 | 92 | Asp-1 to Lys-17, | AR089: 19, AR061: 15 | | | 93-112, |
| | | | | | | Ala-53 to Lys-61, | H0581: 1, H0521: 1 and | | | 112-128. |
| | | | | | | Asp-66 to Arg-73. | H0522: 1. | | | |
| 14 | HDPVY34 | 839178 | 24 | 1-930 | 93 | Leu-2 to Pro-7, | AR089: 2, AR061: 0 | 17q21 | 109270, | 161-178. |
| | | | | | | Tyr-28 to Ser-34, | H0521: 4, L0803: 3, | | 109270, | |
| | | | | | | Ser-37 to Lys-42. | H0063: 2, L0655: 2, | | 109270, | |
| | | | | | | | H0522: 2, L0748: 2, | | 109270, | |
| | | | | | | | L0779: 2, L0731: 2, | | 109270, | |
| | | | | | | | L0586: 1, H0309: 1, | | 113705, | |
| | | | | | | | H0169: 1, L0794: 1, | | 113705, | |
| | | | | | | | H0539: 1, L0750: 1, | | 114200, | |
| | | | | | | | L0777: 1, H0216: 1 and | | 148065, | |
| | | | | | | | S0412: 1. | | 148066, | |
| | | | | | | | | | 148066, | |
| | | | | | | | | | 148067, | |
| | | | | | | | | | 148067, | |
| | | | | | | | | | 148069, | |
| | | | | | | | | | 148080, | |
| | | | | | | | | | 154275, | |
| | | | | | | | | | 168610, | |
| | | | | | | | | | 171190, | |
| | | | | | | | | | 176705, | |
| | | | | | | | | | 185800, | |
| | | | | | | | | | 200350, | |
| | | | | | | | | | 221820, | |
| | | | | | | | | | 232200, | |
| | | | | | | | | | 249000, | |
| | | | | | | | | | 252920, | |
| | | | | | | | | | 253250, | |
| | | | | | | | | | 600119, | |
| | | | | | | | | | 600119, | |
| | | | | | | | | | 601363, | |
| | | | | | | | | | 601844 | |
| 15 | HDQDYS2 | 852622 | 25 | 43-597 | 94 | His-68 to Gly-73, | AR089: 25, AR061: 24 | | | 117-135, |
| | | | | | | Glu-81 to Glu-87. | H0521: 2, H0580: 1, | | | 134-150. |
| | | | | | | | H0393: 1, H0052: 1, | | | |
| | | | | | | | H0081: 1, L0774: 1 and | | | |
| | | | | | | | S0152: 1. | | | |
| 16 | HDQHZ22 | 879416 | 26 | 1-408 | 95 | Gly-1 to Gly-6, | AR089: 7, AR061: 3 | | | 35-55, 69- |
| | | | | | | Asp-62 to Arg-68. | H0521: 2 | | | 85, 108- |
| | | | | | | | | | | 124. |
| 17 | HDTBL45 | 785534 | 27 | 54-404 | 96 | Gly-5 to Cys-12, | AR061: 3, AR089: 2 | | | 67-85 |
| | | | | | | Glu-26 to Arg-52, | H0485: 1, H0486: 1 and | | | |
| | | | | | | Ala-90 to Pro-97, | H0457: 1. | | | |
| | | | | | | Ala-102 to Glu-107. | | | | |
| 18 | HDTIFO1 | 883070 | 28 | 168- | 97 | Met-27 to Glu-34. | AR089: 57, AR061: 40 | | | 6-26, 49- |
| | | | | 527 | | | H0486: 2 | | | 66. |
| 19 | HE6AK76 | 890690 | 29 | 2-526 | 98 | Gly-79 to Ser-84. | AR061: 3, AR089: 2 | | | 47-63. |
| | | | | | | | L0755: 4, L0518: 3, | | | |
| | | | | | | | L0754: 3, S0222: 2, | | | |
| | | | | | | | H0574: 2, H0457: 2, | | | |
| | | | | | | | H0266: 2, H0087: 2, | | | |
| | | | | | | | L0666: 2, L0751: 2, | | | |
| | | | | | | | L0749: 2, L0603: 2, | | | |
| | | | | | | | H0136: 2, H0265: 1, | | | |
| | | | | | | | H0656: 1, S0212: 1, | | | |
| | | | | | | | S0360: 1, H0333: 1, | | | |
| | | | | | | | H0486: 1, H0013: 1, | | | |
| | | | | | | | H0156: 1, H0575: 1, | | | |
| | | | | | | | H0253: 1, S0010: 1, | | | |
| | | | | | | | H0318: 1, H0009: 1, | | | |
| | | | | | | | H0354: 1, H0031: 1, | | | |
| | | | | | | | H0644: 1, H0059: 1, | | | |
| | | | | | | | H0494: 1, L0763: 1, | | | |
| | | | | | | | L0662: 1, L0794: 1, | | | |
| | | | | | | | L0527: 1, L0657: 1, | | | |
| | | | | | | | L0659: 1, L0791: 1, | | | |
| | | | | | | | L0665: 1, S0053: 1, | | | |
| | | | | | | | H0539: 1, H0696: 1, | | | |
| | | | | | | | S0028: 1, L0747: 1, | | | |
| | | | | | | | L0780: 1, L0758: 1, | | | |
| | | | | | | | L0596: 1, H0423: 1, | | | |
| | | | | | | | H0422: 1 and H0008: 1. | | | |
| 20 | HEGAN70 | 839719 | 30 | 1-684 | 99 | Asn-1 to Thr-7. | AR089: 2, AR061: 2 | | | 148-165, |
| | | | | | | | H0620:2, H0550: 1, | | | 183-199. |
| | | | | | | | H0529: 1, L0775: 1, | | | |
| | | | | | | | S0390: 1 and H0665: 1. | | | |
| 21 | HELFN75 | 658681 | 31 | 264- | 100 | | AR051: 6, AR054: 4, | | | 22-46, 56- |
| | | | | 635 | | | AR051: 1, AR089: 1, | | | 79, 101- |
| | | | | | | | AR061: 0 | | | 119. |
| | | | | | | | S0045: 1 | | | |
| 22 | HELGD12 | 695717 | 32 | 455- | 101 | Pro-18 to Gly-25. | AR089: 43, AR061: 14 | | | 112-135, |
| | | | | 985 | | | S0031: 2, S0045: 1, | | | 159-177, |
| | | | | | | | L0476: 1, H0271: 1, | | | 50-66, 88 |
| | | | | | | | S0052: 1, S0126: 1 and | | | 104. |
| | | | | | | | S0028: 1. | | | |
| 23 | HELGW31 | 610003 | 33 | 576- | 102 | Asp-56 to Ser-62, | AR061: 335, AR089: | | | 135-158, |
| | | | | 1337 | | Gly-195 to Ser-202. | 290, AR0512: 10, | | | 86-121, |
| | | | | | | | AR050: 2, AR054: 2 | | | 24-42, |
| | | | | | | | S0045: 1 | | | 162-186, |
| | | | | | | | | | | 75-92, |
| | | | | | | | | | | 213-229. |
| 24 | HETKH30 | 884009 | 34 | 90-884 | 103 | Arg-1 to Lys-8. | AR061: 1, AR089: 1 | | | 181-199, |
| | | | | | | | H0046: 5, H0040: 2, | | | 46-62. |
| | | | | | | | H0519: 2, L0439: 2, | | | |
| | | | | | | | L0758: 2, H0575: 1 and | | | |
| | | | | | | | T0042: 1. | | | |
| 25 | HFIEC13 | 883185 | 35 | 1-525 | 104 | Glu-1 to Arg-13. | AR061: 168, AR089: | | | 143-161. |
| | | | | | | | 145 | | | |
| | | | | | | | S0192: 2 | | | |
| 26 | HFIHE47 | 857988 | 36 | 385- | 105 | Pro-1 to Gly-6, | AR089: 17, AR061: 17 | | | 141-160, |
| | | | | 1659 | | Phe-31 to Thr-36, | S0250: 1, L0439: 1 and | | | 356-372. |
| | | | | | | Gln-66 to Leu-75, | S0194: 1. | | | |
| | | | | | | Leu-83 to Pro-91. | | | | |
| 27 | HFRBN81 | 833061 | 37 | 1-1116 | 106 | Gly-113 to Gly-119, | AR050: 10, AR051: 3, | | | 338-361, |
| | | | | | | Gln-173 to Thr-181, | AR061: 1, AR089: 1, | | | 250-273, |
| | | | | | | Ala-362 to Pro-368. | AR054: 0 | | | 64-85, 91 |
| | | | | | | | S0028: 4, S0001: 2, | | | 111, 197- |
| | | | | | | | S0278: 2, S0050: 2, | | | 216, 223- |
| | | | | | | | S0282: 1, H0632: 1, | | | 240, 149- |
| | | | | | | | H0271: 1, H0416: 1, | | | 166, 275- |
| | | | | | | | H0027: 1, 50038: 1, | | | 292, 123- |
| | | | | | | | S0052: 1, S0053: 1, | | | 139, 308- |
| | | | | | | | H0684: 1 and S0044: 1. | | | 324. |
| 28 | HHFGC14 | 741650 | 38 | 38-370 | 107 | Gln-1 to Asn-10. | AR089: 9, AR061: 5 | | | 12-28, 60- |
| | | | | | | | H0050: 2 | | | 76. |
| 29 | HHPDZ65 | 890894 | 39 | 1-450 | 108 | Thr-30 to Tyr-39, | AR051: 629, AR054: | | | 79-95. |
| | | | | | | Ala-110 to Ala-116. | 531, AR050: 471, | | | |
| | | | | | | | AR089: 25, AR061: 10 | | | |
| | | | | | | | H0051: 1 | | | |
| 30 | HHSAD81 | 847391 | 40 | 1781- | 109 | Arg-164 to Arg-169. | AR054: 2, AR050: 2, | | | |
| | | | | 1107 | | | AR051: 2, AR061: 1, | | | |
| | | | | | | | AR089: 1 | | | |
| | | | | | | | H0494: 2, H0544: 1, | | | |
| | | | | | | | S0051: 1, L0754: 1 and | | | |
| | | | | | | | H0542: 1. | | | |
| 31 | HJBBP54 | 869621 | 41 | 3-575 | 110 | | AR061: 193, AR089: 73 | | | 164-181, |
| | | | | | | | H0265: 1, H0050: 1, | | | 84-100. |
| | | | | | | | H0634: 1 and T0042: 1. | | | |
| 32 | HKAR71 | 863023 | 42 | 54-977 | 111 | Gln-1 to Gln-6, | AR061: 1, AR089: 0 | | | 194-211, |
| | | | | | | Ser-24 to Thr-31, | H0494: 2, H0693: 2, | | | 237-253. |
| | | | | | | Pro-57 to Gln-63, | H0521: 2, H0580: 1, | | | |
| | | | | | | Ala-96 to Met-104, | H0253: 1, H0628: 1, | | | |
| | | | | | | Asn-124 to Lys-133, | H0522: 1 and H0422: 1. | | | |
| | | | | | | Ser-172 to Trp-182, | | | | |
| | | | | | | Ser-186 to Glu-194, | | | | |
| | | | | | | Pro-286 to Pro-294. | | | | |
| 33 | HLJDW02 | 837592 | 43 | 2-517 | 112 | | AR061: 2, AR089: 1 | | | 92-109, |
| | | | | | | | H0549: 1, H0575: 1, | | | 114-130, |
| | | | | | | | H0375: 1, H0647: 1, | | | 64-80. |
| | | | | | | | L0774: 1 and L0779: 1. | | | |
| 34 | HLWDW80 | 879159 | 44 | 3-644 | 113 | Pro-3 to Lys-11, | AR089: 1, AR061: 1 | | | 16-39, 72- |
| | | | | | | Glu-54 to His-60, | S0222: 1, S0010: 1, | | | 95. |
| | | | | | | Gly-111 to Glu-116, | H0046: 1, H0615: 1 and | | | |
| | | | | | | Glu-120 to Gln-126, | H0553: 1. | | | |
| | | | | | | Arg-144 to Ser-159, | | | | |
| | | | | | | Asp-167 to Ala-173, | | | | |
| | | | | | | Val-180 to Gly-185. | | | | |
| 35 | HLYGH51 | 871634 | 45 | 162- | 114 | Ser-68 to Ala-73. | AR089: 1, AR061: 0 | | | 5-24, 77- |
| | | | | 464 | | | L0748: 1 and H0445: 1. | | | 93. |
| 36 | HMAIA55 | 899404 | 46 | 89-877 | 115 | Pro-28 to Cys-34, | AR051: 37, AR061: 9, | | | 112-140, |
| | | | | | | Asn-153 to Gly-161, | AR054: 6, AR089: 4, | | | 78-101, |
| | | | | | | Ala-227 to Asn-233. | AR050: 1 | | | |
| | | | | | | | S0278: 1 | | | |
| 37 | HMCDN22 | 895981 | 47 | 1-627 | 116 | Gly-1 to Lys-9, | AR089: 2, AR061: 1 | | | 136-155. |
| | | | | | | Lys-15 to Gly-20, | S0142: 1, L0747: 1 and | | | |
| | | | | | | Arg-26 to Ala-36, | H0423: 1. | | | |
| | | | | | | Tyr-108 to Leu-113. | | | | |
| 38 | HMELR71 | 907836 | 48 | 34- | 117 | Pro-22 to Arg-32, | AR061: 7, AR089: 3 | | | 414-431, |
| | | | | 1326 | | Leu-122 to Asp-127, | L0803: 3, L0595: 3, | | | 174-190. |
| | | | | | | Gln-134 to Tyr-140, | H0687: 2, L0731: 2, | | | |
| | | | | | | Asp-153 to Arg-168. | S0040: 1, H0638: 1, | | | |
| | | | | | | | S0356: 1, H0393: 1, | | | |
| | | | | | | | S0222: 1, H0415: 1, | | | |
| | | | | | | | T0014: 1, H0575: 1, | | | |
| | | | | | | | T0003: 1, H0356: 1, | | | |
| | | | | | | | H0266: 1, S0314: 1, | | | |
| | | | | | | | S0022: 1, H0169: 1, | | | |
| | | | | | | | H0412: 1, H0494: 1, | | | |
| | | | | | | | S0150: 1, H0026: 1, | | | |
| | | | | | | | L0800: 1, L0650: 1, | | | |
| | | | | | | | L0792: 1, L0663: 1, | | | |
| | | | | | | | S0374: 1, T0068: 1, | | | |
| | | | | | | | H0520: 1, H0519: 1, | | | |
| | | | | | | | S0152: 1, H0552: 1, | | | |
| | | | | | | | L0754: 1, L0777: 1, | | | |
| | | | | | | | S0192: 1 and H0543: 1. | | | |
| 39 | HNFCS26 | 899406 | 49 | 2-994 | 118 | Cys-40 to Asn-46, | AR054: 17, AR051: 12, | | | 184-210, |
| | | | | | | Gln-283 to Trp-291, | AR050: 9, AR061: 4, | | | 258-280, |
| | | | | | | Ser-298 to Tyr-305, | AR089: 1 | | | 232-248, |
| | | | | | | Leu-307 to Gly-320, | H0271: 6, H0556: 5, | | | 143-160, |
| | | | | | | Gln-326 to Tyr-331. | L0748: 5, L0803: 4, | | | 116-132. |
| | | | | | | | H0411: 3, H0586: 3, | | | |
| | | | | | | | H0036: 3, L0666: 3, | | | |
| | | | | | | | H0222: 2, S0212: 2, | | | |
| | | | | | | | H0075: 2, H0575: 2, | | | |
| | | | | | | | H0046: 2, H0071: 2, | | | |
| | | | | | | | S0003: 2, H0615: 2, | | | |
| | | | | | | | L0483: 2, H0623: 2, | | | |
| | | | | | | | H0494: 2, L0659: 2, | | | |
| | | | | | | | L0565: 2, S0380: 2, | | | |
| | | | | | | | H0521: 2, L0740: 2, | | | |
| | | | | | | | L0731: 2, S0194: 2, | | | |
| | | | | | | | H0265: 1, S0418: 1, | | | |
| | | | | | | | H0580: 1, H0587: 1, | | | |
| | | | | | | | H0069: 1, H0427: 1, | | | |
| | | | | | | | H0599: 1, H0004: 1, | | | |
| | | | | | | | H0581: 1, T0115: 1, | | | |
| | | | | | | | H0024: 1, S0362: 1, | | | |
| | | | | | | | H0355: 1, H0375: 1, | | | |
| | | | | | | | H0266: 1, H0687: 1, | | | |
| | | | | | | | H0028: 1, S0250: 1, | | | |
| | | | | | | | H0252: 1, H0328: 1, | | | |
| | | | | | | | L0055: 1, H0212: 1, | | | |
| | | | | | | | H0598: 1, H0056: 1, | | | |
| | | | | | | | H0132: 1, H0647: 1, | | | |
| | | | | | | | S0142: 1, H0529: 1, | | | |
| | | | | | | | L0369: 1, L0372: 1, | | | |
| | | | | | | | L0646: 1, L0773: 1, | | | |
| | | | | | | | L0774: 1, L0607: 1, | | | |
| | | | | | | | L0515: 1, L0788: 1, | | | |
| | | | | | | | L0665: 1, H0144: 1, | | | |
| | | | | | | | H0702: 1, S0126: 1, | | | |
| | | | | | | | H0689: 1, H0690: 1, | | | |
| | | | | | | | H0684: 1, H0435: 1, | | | |
| | | | | | | | S0328: 1, S0378: 1, | | | |
| | | | | | | | H0478: 1, H0626: 1, | | | |
| | | | | | | | S3012: 1, S0027: 1, | | | |
| | | | | | | | S0028: 1, S0206: 1, | | | |
| | | | | | | | L0608: 1, S0192: 1 and | | | |
| | | | | | | | H0543: 1. | | | |
| 40 | HNGFK28 | 544726 | 50 | 1-756 | 119 | Glu-4 to Asn-15, | AR061: 6, AR089: | | | 29-55, 57- |
| | | | | | | Ser-104 to Gly-111, | S0052: 3 | | | 74. |
| | | | | | | Leu-230 to Pro-237. | | | | |
| 41 | HNGIY79 | 775229 | 51 | 3-530 | 120 | Lys-31 to Gly-37, | AR061: 10, AR089: 5 | | | 131-147. |
| | | | | | | Pro-56 to Phe-65, | T0042: 1, S0052: 1, | | | |
| | | | | | | Leu-77 to Asp-83, | H0521: 1 and L0439: 1. | | | |
| | | | | | | Pro-91 to Lys-97. | | | | |
| 42 | HNGMJ89 | 786340 | 52 | 107- | 121 | Ala-63 to Trp-69. | AR089: 15, AR061: 7 | | | |
| | | | | 463 | | | S0428: 2 | | | |
| 43 | HNHAG26 | 866694 | 53 | 251- | 122 | AR061: 7, AR089: 2 | | | | |
| | | | | 880 | | | | | | |
| 44 | HNHCI32 | 861673 | 54 | 183- | 123 | Lys-17 to Thr-23, | AR051: 23, AR050: 14, | | | 24-42, |
| | | | | 593 | | His-95 to Thr-101. | AR061: 10, AR054: 4, | | | 107-125, |
| | | | | | | | AR089: 3 | | | 67-83. |
| | | | | | | | S0053: 1 | | | |
| 45 | HNHKN73 | 762011 | 55 | 51-443 | 124 | Asp-15 to Ser-20, | AR061: 7, AR089: 4 | | | 55-77. |
| | | | | | | Arg-40 to Gly-46. | S0216: 2 | | | |
| 46 | HNTBH68 | 851274 | 56 | 1-540 | 125 | Ala-51 to Ser-57, | AR089: 6, AR061: 3 | | | 112-139, |
| | | | | | | Glu-108 to Trp-113, | L0005: 1, H0144: 1, | | | 83-106. |
| | | | | | | Phe-138 to Glu-146. | L0438: 1, H0519: 1, | | | |
| | | | | | | | H0539: 1 and L0439: 1. | | | |
| 47 | HORBO54 | 870674 | 57 | 115- | 126 | | AR061: 4, AR089: 2 | | | 90-114, |
| | | | | 549 | | | L0758: 4, H0556: 3, | | | 71-87, |
| | | | | | | | H0657: 3, H0435: 3, | | | 113-429. |
| | | | | | | | L0749: 3, L0777: 3, | | | |
| | | | | | | | H0677: 3, S0045: 2, | | | |
| | | | | | | | H0619: 2, H0586: 2, | | | |
| | | | | | | | H0032: 2, H0616: 2, | | | |
| | | | | | | | L0772: 2, H0701: 2, | | | |
| | | | | | | | H0547: 2, S0328: 2, | | | |
| | | | | | | | H0543: 2, S0040: 1, | | | |
| | | | | | | | S6024: 1, H0295: 1, | | | |
| | | | | | | | H0650: 1, S0116: 1, | | | |
| | | | | | | | H0661: 1, H0664: 1, | | | |
| | | | | | | | S0444: 1, H0580: 1, | | | |
| | | | | | | | S0132: 1, S0278: 1, | | | |
| | | | | | | | H0486: 1, H0013: 1, | | | |
| | | | | | | | H0069: 1, H0427: 1, | | | |
| | | | | | | | H0004: 1, H0530: 1, | | | |
| | | | | | | | H0050: 1, H0292: 1, | | | |
| | | | | | | | T0006: 1, H0553: 1, | | | |
| | | | | | | | H0181: 1, L0455: 1, | | | |
| | | | | | | | H0038: 1, H0413: 1, | | | |
| | | | | | | | T0042: 1, H0494: 1, | | | |
| | | | | | | | H0561: 1, H0509: 1, | | | |
| | | | | | | | S0344: 1, S0210: 1, | | | |
| | | | | | | | L0768: 1, H0144: 1, | | | |
| | | | | | | | L0438. 1, H0520. 1, | | | |
| | | | | | | | H0519: 1, H0593: 1, | | | |
| | | | | | | | H0539: 1, H0521: 1, | | | |
| | | | | | | | H0522: 1, H0134: 1, | | | |
| | | | | | | | H0555: 1, S0028: 1, | | | |
| | | | | | | | L0743: 1, L0740: 1, | | | |
| | | | | | | | L0752: 1, L0755: 1, | | | |
| | | | | | | | L0759: 1, H0445: 1, | | | |
| | | | | | | | L0596: 1, L0595: 1, | | | |
| | | | | | | | H0542: 1, H0423: 1 and | | | |
| | | | | | | | S0424: 1. | | | |
| 48 | HPCID78 | 886915 | 58 | 1-429 | 127 | Gly-1 to Cys-7. | AR054: 2, AR051: 1, | | | 25-41, |
| | | | | | | | AR089: 1, AR061: 0 | | | 105-121, |
| | | | | | | | H0642: 1 | | | 75-91. |
| 49 | HPMED52 | 531347 | 59 | 2-451 | 128 | Lys-23 to Ser-33. | AR061: 6, AR089: 3 | | | 101-117. |
| | | | | | | | H0031: 3 | | | |
| 50 | HPWCJ63 | 772553 | 60 | 148- | 129 | Lys-213 to Gly-220. | AR054: 2, AR051: 1, | | | |
| | | | | 807 | | | AR061: 0, AR089: 0, | | | |
| | | | | | | | AR050: 0 | | | |
| | | | | | | | S0001: 1, H0191: 1 and | | | |
| | | | | | | | S0044: 1. | | | |
| 51 | HRABY74 | 666239 | 61 | 33-374 | 130 | | AR089: 8, AR061: 3 | | | 49-66. |
| | | | | | | | H0555: 2 | | | |
| 52 | HRADZ48 | 883281 | 62 | 2-541 | 131 | | AR054: 12, AR050: 7, | | | 67-87, |
| | | | | | | | AR061: 2, AR051: 2, | | | 118-140. |
| | | | | | | | AR089: 1 | | | |
| | | | | | | | H0555: 1 | | | |
| 53 | HRDFT45 | 506584 | 63 | 123- | 132 | | AR061: 1, AR089: 0 | | | 49-68, 11- |
| | | | | 527 | | | H0124: 3 | | | 30. |
| 54 | HROAI61 | 742084 | 64 | 1-609 | 133 | | AR089: 4, AR061: 3 | | | 148-170, |
| | | | | | | | H0316: 1 and L0747: 1. | | | 95-113. |
| 55 | HSDGH48 | 853378 | 65 | 3-1064 | 134 | Leu-27 to Leu-32, | AR061: 38, AR089: 20 | | | 244-272, |
| | | | | | | Val-273 to Arg-279, | S0278: 1 and S0031: 1. | | | 166-194, |
| | | | | | | Leu-334 to Ala-354. | | | | 311-333, |
| | | | | | | | | | | 129-156, |
| | | | | | | | | | | 36-64, 99- |
| | | | | | | | | | | 127, 188- |
| | | | | | | | | | | 207, 222- |
| | | | | | | | | | | 242, 66- |
| | | | | | | | | | | 82, 280- |
| | | | | | | | | | | 296. |
| 56 | HSDIW73 | 587311 | 66 | 2-1075 | 135 | Leu-6 to Pro-11, | AR051: 4, AR054: 1, | | | 236-256, |
| | | | | | | Ile-66 to Arg-71, | AR089: 1, AR061: 0, | | | 256-280, |
| | | | | | | Asn-144 to Pro-149, | AR050: 0 | | | 324-348, |
| | | | | | | Pro-351 to Asp-358. | S0046: 1, S0028: 1, | | | 95-121, |
| | | | | | | | S0031: 1 and S0260: 1. | | | 79-99, |
| | | | | | | | | | | 302-321, |
| | | | | | | | | | | 199-217, |
| | | | | | | | | | | 283-299, |
| | | | | | | | | | | 15-31. |
| 57 | HSDJX58 | 891067 | 67 | 729- | 136 | Tyr-101 to Glu-108, | AR054: 11, AR050: 3, | | | 67-102, |
| | | | | 1487 | | Pro-110 to Arg-116, | AR051: 3, AR089: 2, | | | 115-138, |
| | | | | | | Tyr-158 to Gln-164. | AR061: 2 | | | 30-51, 56- |
| | | | | | | | L0748: 7, H0171: 2, | | | 76, 169- |
| | | | | | | | H0624: 1, H0341: 1, | | | 185, 140- |
| | | | | | | | S0280: 1, H0271: 1, | | | 156, 4-20. |
| | | | | | | | H0032: 1, L0367: 1, | | | |
| | | | | | | | L0439: 1, S0031: 1 and | | | |
| | | | | | | | S0260: 1. | | | |
| 58 | HSKJR15 | 866396 | 68 | 59-406 | 137 | Gln-11 to Gly-18, | AR089: 1, AR061: 0 | | | 85-103, |
| | | | | | | Asn-25 to Ser-30. | L0666: 1, S3014: 1 and | | | 41-57. |
| | | | | | | | L0756: 1. | | | |
| 59 | HSLCF96 | 637670 | 69 | 355- | 138 | Val-2 to Trp-7, | AR054: 38, AR050: 26, | | | 180-212, |
| | | | | 1248 | | Lys-9 to Trp-18, | AR051: 25, AR061: 2, | | | 54-76, |
| | | | | | | Gln-20 to Gly-25, | AR089: 1 | | | 169-189, |
| | | | | | | Gln-79 to His-85, | S0028: 1 | | | 32-52, |
| | | | | | | Pro-134 to Asp-139, | | | | 139-155, |
| | | | | | | Asp-164 to Thr-171, | | | | 115-131. |
| | | | | | | Pro-223 to Arg-228. | | | | |
| 60 | HSLFF79 | 609838 | 70 | 64-741 | 139 | Phe-132 to Gln-137, | AR089: 1, AR061: 0 | | | 150-172, |
| | | | | | | Arg-209 to Gly-220. | S0028: 2 and S0300: 1. | | | 173-199, |
| | | | | | | | | | | 39-67, |
| | | | | | | | | | | 100-122, |
| | | | | | | | | | | 18-39, 74- |
| | | | | | | | | | | 90. |
| 61 | HTEGJ74 | 765901 | 71 | 3-452 | 140 | | AR089: 3, AR061: 2 | | | 42-63 |
| | | | | | | | L0439: 2 and H0038: 1. | | | |
| 62 | HTNBE16 | 667653 | 72 | 264- | 141 | Glu-28 to Phe-37. | AR061: 1, AR089: 1 | | | 62-78, 41- |
| | | | | 572 | | | L0756: 2 and T0067: 1. | | | 57 |
| 63 | HTWEP40 | 694287 | 73 | 2-457 | 142 | Arg-14 to Gly-28, | AR089: 4, AR061: 2 | | | 98-115 |
| | | | | | | Thr-45 to Ala-52, | S0374: 2, L0750: 2, | | | |
| | | | | | | Val-54 to Ser-64, | L0362: 2, S0354: 1, | | | |
| | | | | | | Gln-72 to Asn-78. | L0622: 1, L0157: 1, | | | |
| | | | | | | | L0766: 1, L0775: 1, | | | |
| | | | | | | | L0806: 1, L0655: 1, | | | |
| | | | | | | | L0659: 1, L0790: 1, | | | |
| | | | | | | | H0436: 1, L0755: 1, | | | |
| | | | | | | | L0731: 1 and L0757: 1. | | | |
| 64 | HTXGF27 | 695766 | 74 | 1-1011 | 143 | Gly-1 to Gly-6, | AR061: 3, AR089: 3 | | | 22-48, |
| | | | | | | Ser-16 to Ala-23, | L0769: 5, L0752: 5, | | | 115-131, |
| | | | | | | Thr-114 to Lys-120, | S0358: 4, H0448: 4, | | | 291-307, |
| | | | | | | Thr-274 to Ser-280, | L0754: 4, H0052: 3 | | | 133-149 |
| | | | | | | Arg-327 to Ser-337. | L0773: 3, L0666: 3, | | | |
| | | | | | | | L0740: 3, L0750: 3, | | | |
| | | | | | | | L0596: 3, H0370: 2, | | | |
| | | | | | | | H0024: 2, H0083: 2, | | | |
| | | | | | | | H0031: 2, H0090: 2, | | | |
| | | | | | | | S0142: 2, L0766: 2, | | | |
| | | | | | | | L0663: 2, L0747: 2, | | | |
| | | | | | | | L0753: 2, L0588: 2, | | | |
| | | | | | | | L0599: 2, H0265: 1, | | | |
| | | | | | | | S0040: 1, H0583: 1, | | | |
| | | | | | | | H0656: 1, S0442: 1, | | | |
| | | | | | | | H0393: 1, H0431: 1, | | | |
| | | | | | | | L0622: 1, H0635: 1, | | | |
| | | | | | | | S0280: 1, L0021: 1, | | | |
| | | | | | | | H0002: 1, H0036: 1, | | | |
| | | | | | | | H0421: 1, H0204: 1, | | | |
| | | | | | | | H0046: 1, H0014: 1, | | | |
| | | | | | | | H0015: 1, S6028: 1, | | | |
| | | | | | | | H0266: 1, H0169: 1, | | | |
| | | | | | | | S0366: 1, H0040: 1, | | | |
| | | | | | | | H0264: 1, S0038: 1, | | | |
| | | | | | | | H0494: 1, L0772: 1, | | | |
| | | | | | | | L0372: 1, L0374: 1, | | | |
| | | | | | | | L0644: 1, L0765: 1, | | | |
| | | | | | | | L0771. 1, L0364. 1, | | | |
| | | | | | | | L0806: 1, L0659: 1, | | | |
| | | | | | | | L0783: 1, L0647: 1, | | | |
| | | | | | | | L0665: 1, H0435: 1, | | | |
| | | | | | | | H0658: 1, H0214: 1, | | | |
| | | | | | | | L0751: 1, L0731: 1, | | | |
| | | | | | | | L0758: 1, L0759: 1, | | | |
| | | | | | | | H0653: 1, L0462: 1 and | | | |
| | | | | | | | H0352: 1. | | | |
| 65 | HTXPS22 | 868293 | 75 | 148- | 144 | Tyr-13 to Lys-24, | AR054: 23, AR051: 20, | | | 119-135, |
| | | | | 1134 | | Glu-57 to Lys-67, | AR050: 19, AR089: 3, | | | 17-33, 86- |
| | | | | | | Glu-219 to Leu-226, | AR061: 2 | | | 102, 176- |
| | | | | | | Val-268 to Gly-273, | L0766: 14, L0758: 6, | | | 192, 284- |
| | | | | | | Met-322 to Arg-329. | H0556: 4, H0013: 4, | | | 300 |
| | | | | | | | H0424: 4, H0036: 3, | | | |
| | | | | | | | H0124: 3, H0090: 3, | | | |
| | | | | | | | L0764: 3, L0439: 3, | | | |
| | | | | | | | L0759: 3, H0543: 3, | | | |
| | | | | | | | H0265: 2, H0341: 2, | | | |
| | | | | | | | H0050: 2, H0266: 2, | | | |
| | | | | | | | L0438: 2, L0740: 2, | | | |
| | | | | | | | L0749: 2, L0601: 2, | | | |
| | | | | | | | T0049: 1, S0356: 1, | | | |
| | | | | | | | H0393: 1, L0717: 1, | | | |
| | | | | | | | H0403: 1, H0497: 1, | | | |
| | | | | | | | H0559: 1, H0575: 1, | | | |
| | | | | | | | H0253: 1, S0346: 1, | | | |
| | | | | | | | H0318: 1, H0581: 1, | | | |
| | | | | | | | S0049: 1, T0110: 1, | | | |
| | | | | | | | H0083: 1, H0247: 1, | | | |
| | | | | | | | T0006. 1, H0213. 1, | | | |
| | | | | | | | H0030: 1, S0364: 1, | | | |
| | | | | | | | S0366: 1, H0488: 1, | | | |
| | | | | | | | H0412: 1, L0564: 1, | | | |
| | | | | | | | T0042: 1, H0494: 1, | | | |
| | | | | | | | H0646: 1, S0344: 1, | | | |
| | | | | | | | H0538: 1, L0770: 1, | | | |
| | | | | | | | L0771: 1, L0626: 1, | | | |
| | | | | | | | L0767: 1, L0768: 1, | | | |
| | | | | | | | L0794: 1, L0804: 1, | | | |
| | | | | | | | L0774: 1, L0805: 1, | | | |
| | | | | | | | L0655: 1, L0659: 1, | | | |
| | | | | | | | L0665: 1, H0520: 1, | | | |
| | | | | | | | H0519: 1, H0660: 1, | | | |
| | | | | | | | H0539: 1, S0152: 1, | | | |
| | | | | | | | S0350: 1, H0521: 1, | | | |
| | | | | | | | S0028: 1, L0748: 1, | | | |
| | | | | | | | L0751: 1, L0750: 1, | | | |
| | | | | | | | L0777: 1, L0755: 1, | | | |
| | | | | | | | L0731: 1, H0445: 1, | | | |
| | | | | | | | L0596: 1, L0592: 1 and | | | |
| | | | | | | | H0423: 1. | | | |
| 66 | HUSJN66 | 886987 | 76 | 3-455 | 145 | Arg-22 to Pro-31, | AR050: 86, AR054: 82, | | | 102-120 |
| | | | | | | Pro-39 to Arg-50, | AR051: 63, AR089: 14, | | | |
| | | | | | | Asp-86 to Gly-91, | AR061: 11 | | | |
| | | | | | | Phe-96 to Ser-105, | H0412: 1 and L0759: 1. | | | |
| | | | | | | Gly-114 to Gly-120, | | | | |
| | | | | | | Asp-132 to Ser-139. | | | | |
| 67 | HUSJT79 | 866511 | 77 | 418- | 146 | Tyr-13 to Lys-24, | AR089: 5, AR061: 4 | | | 119-135, |
| | | | | 1404 | | Glu-57 to Lys-67, | H0052: 15, L0766: 14, | | | 17-33, 86- |
| | | | | | | Glu-219 to Leu-226, | L0439: 9, 50222: 8, | | | 102, 176- |
| | | | | | | Val-268 to Gly-273, | H0013: 6, H0424: 6, | | | 192, 284- |
| | | | | | | Met-322 to Arg-329. | L0758: 6, H0556: 4, | | | 300 |
| | | | | | | | H0036: 4, H0434: 3, | | | |
| | | | | | | | H0009: 3, H0124: 3, | | | |
| | | | | | | | H0090: 3, 50038: 3, | | | |
| | | | | | | | L0770: 3, L0764: 3, | | | |
| | | | | | | | L0794: 3, L0438: 3, | | | |
| | | | | | | | H0660: 3, L0741: 3, | | | |
| | | | | | | | L0745: 3, L0752: 3, | | | |
| | | | | | | | L0759: 3, H0543: 3, | | | |
| | | | | | | | H0265: 2, H0341: 2, | | | |
| | | | | | | | S0300: 2, L0717: 2, | | | |
| | | | | | | | H0261: 2, H0599: 2, | | | |
| | | | | | | | H0575: 2, H0050: 2, | | | |
| | | | | | | | S0051: 2, H0266: 2, | | | |
| | | | | | | | H0213: 2, L0456: 2, | | | |
| | | | | | | | S0036: 2, L0769: 2, | | | |
| | | | | | | | L0768: 2, L0805: 2, | | | |
| | | | | | | | H0539: 2, L0740: 2, | | | |
| | | | | | | | L0751: 2, L0746: 2, | | | |
| | | | | | | | L0749: 2, L0592: 2, | | | |
| | | | | | | | L0601: 2, T0049: 1, | | | |
| | | | | | | | S0282: 1, L0005: 1, | | | |
| | | | | | | | S0356: 1, S0360: 1, | | | |
| | | | | | | | H0580: 1, S0007: 1, | | | |
| | | | | | | | H0393: 1, S6016: 1, | | | |
| | | | | | | | H0441: 1, H0403: 1, | | | |
| | | | | | | | H0497: 1, H0559: 1, | | | |
| | | | | | | | H0156: 1, H0590: 1, | | | |
| | | | | | | | H0618: 1, H0253: 1, | | | |
| | | | | | | | S0010: 1, S0346: 1, | | | |
| | | | | | | | H0318: 1, H0581: 1, | | | |
| | | | | | | | S0049: 1, H0194: 1, | | | |
| | | | | | | | T0110: 1, H0545: 1, | | | |
| | | | | | | | H0086: 1, H0123: 1, | | | |
| | | | | | | | S0388: 1, H0071: 1, | | | |
| | | | | | | | T0010: 1, H0083: 1, | | | |
| | | | | | | | H0247: 1, T0006: 1, | | | |
| | | | | | | | H0030: 1, H0553: 1, | | | |
| | | | | | | | H0166: 1, S0364: 1, | | | |
| | | | | | | | L0455: 1, S0366: 1, | | | |
| | | | | | | | H0135: 1, H0488: 1, | | | |
| | | | | | | | H0412: 1, H0100: 1, | | | |
| | | | | | | | L0564: 1, T0041: 1, | | | |
| | | | | | | | T0042: 1, H0494: 1, | | | |
| | | | | | | | H0646: 1, S0344: 1, | | | |
| | | | | | | | H0538: 1, L0772: 1, | | | |
| | | | | | | | L0771: 1, L0662: 1, | | | |
| | | | | | | | L0626: 1, L0767: 1, | | | |
| | | | | | | | L0803: 1, L0804: 1, | | | |
| | | | | | | | L0774: 1, L0655: 1, | | | |
| | | | | | | | L0807: 1, L0659: 1, | | | |
| | | | | | | | L0809: 1, L0792: 1, | | | |
| | | | | | | | L0665: 1, H0144: 1, | | | |
| | | | | | | | H0520: 1, H0519: 1, | | | |
| | | | | | | | S0152: 1, S0350: 1, | | | |
| | | | | | | | H0521: 1, H0555: 1, | | | |
| | | | | | | | L0612: 1, S0028: 1, | | | |
| | | | | | | | L0748: 1, L0747: 1, | | | |
| | | | | | | | L0750: 1, L0777: 1, | | | |
| | | | | | | | L0755: 1, L0731: 1, | | | |
| | | | | | | | S0031: 1, H0445: 1, | | | |
| | | | | | | | L0596: 1, L0593: 1, | | | |
| | | | | | | | L0366: 1 and H0423: 1. | | | |
| 68 | HWAGP22 | 909919 | 78 | 3-1151 | 147 | Arg-15 to Leu-23, | AR089: 1, AR061: 1 | | | 52-69, |
| | | | | | | Glu-70 to Lys-76, | L0751: 7, H0575: 2, | | | 319-335 |
| | | | | | | Lys-96 to Gln-102, | H0617: 2, H0634: 2, | | | |
| | | | | | | Leu-119 to Arg-124, | L0438: 2, L0747: 2, | | | |
| | | | | | | Ala- 141 to Glu-146, | L0601: 2, H0556: 1, | | | |
| | | | | | | Leu-159 to Glu-169, | S0040: 1, H0484: 1, | | | |
| | | | | | | Thr-195 to Lys-202, | H0306: 1, S0360: 1, | | | |
| | | | | | | Gln-239 to Gly-251. | H0550: 1, H0607: 1, | | | |
| | | | | | | | H0586: 1, H0004: 1, | | | |
| | | | | | | | H0581: 1, H0288: 1, | | | |
| | | | | | | | H0553: 1, HO100: 1, | | | |
| | | | | | | | T0042: 1, L0764: 1, | | | |
| | | | | | | | L0766: 1, L0653: 1, | | | |
| | | | | | | | S0052: 1, H0144: 1, | | | |
| | | | | | | | H0701: 1, L0777: 1, | | | |
| | | | | | | | S0192: 1, H0542: 1 and | | | |
| | | | | | | | H0543: 1. | | | |
| 69 | HWBAO18 | 751125 | 79 | 1-396 | 148 | Arg-1 to Ser-7, | AR089: 3, AR061: 2 | | | 95-112 |
| | | | | | | Pro-22 to Ala-28, | L0777: 7, L0439: 6, | | | |
| | | | | | | Lys-84 to Ala-89, | L0809: 3, S0126: 3, | | | |
| | | | | | | Pro-92 to Ala-99. | S0342: 2, H0580: 2, | | | |
| | | | | | | | H0581: 2, S0002: 2, | | | |
| | | | | | | | L0776: 2, L0438: 2, | | | |
| | | | | | | | L0748: 2, L0745: 2, | | | |
| | | | | | | | L0749: 2, L0779: 2, | | | |
| | | | | | | | L0757: 2, L0759: 2, | | | |
| | | | | | | | H0556: 1, H0294: 1, | | | |
| | | | | | | | L0415: 1, S0418: 1, | | | |
| | | | | | | | H0333: 1, H0559: 1, | | | |
| | | | | | | | H0486: 1, H0250: 1, | | | |
| | | | | | | | H0505: 1, H0052: 1, | | | |
| | | | | | | | H0546: 1, L0471: 1, | | | |
| | | | | | | | H0057: 1, H0510: 1, | | | |
| | | | | | | | H0266: 1, H0553: 1, | | | |
| | | | | | | | H0674: 1, H0488: 1, | | | |
| | | | | | | | H0366: 1, H0641: 1, | | | |
| | | | | | | | S0142: 1, L0770: 1, | | | |
| | | | | | | | L0761: 1, L0641: 1, | | | |
| | | | | | | | L0773: 1, L0521: 1, | | | |
| | | | | | | | L0766: 1, L0381: 1, | | | |
| | | | | | | | L0775: 1, L0653: 1, | | | |
| | | | | | | | L0655: 1, L0659: 1, | | | |
| | | | | | | | L0542: 1, L0787: 1, | | | |
| | | | | | | | L0789: 1, L0666: 1, | | | |
| | | | | | | | L0663: 1, H0659: 1, | | | |
| | | | | | | | H0670: 1, S0380: 1, | | | |
| | | | | | | | H0521: 1, L0747: 1, | | | |
| | | | | | | | L0758: 1, S0031: 1, | | | |
| | | | | | | | H0445: 1, S0242: 1, | | | |
| | | | | | | | H0422: 1 and S0458: 1. | | | |

[0076] The first column in Table 1A provides the gene number in the application corresponding to the clone identifier. The second column in Table 1A provides a unique “Clone ID NO:Z” for a cDNA clone related to each contig sequence disclosed in Table 1A. This clone ID references the cDNA clone which contains at least the 5′ most sequence of the assembled contig and at least a portion of SEQ ID NO:X was determined by directly sequencing the referenced clone. The reference clone may have more sequence than described in the sequence listing or the clone may have less. In the vast majority of cases, however, the clone is believed to encode a full-length polypeptide. In the case where a clone is not full-length, a full-length cDNA can be obtained by methods described elsewhere herein.

[0077] The third column in Table 1A provides a unique “Contig ID” identification for each contig sequence. The fourth column provides the “SEQ ID NO:” identifier for each of the contig polynucleotide sequences disclosed in Table 1A. The fifth column, “ORF (From-To)”, provides the location (i.e., nucleotide position numbers) within the polynucleotide sequence “SEQ ID NO:X” that delineate the preferred open reading frame (ORF) shown in the sequence listing and referenced in Table 1A, column 6, as SEQ ID NO:Y. Where the nucleotide position number “To” is lower than the nucleotide position number “From”, the preferred ORF is the reverse complement of the referenced polynucleotide sequence.

[0078] The sixth column in Table 1A provides the corresponding SEQ ID NO:Y for the polypeptide sequence encoded by the preferred ORF delineated in column 5. In one embodiment, the invention provides an amino acid sequence comprising, or alternatively consisting of, a polypeptide encoded by the portion of SEQ ID NO:X delineated by “ORF (From-To)”. Also provided are polynucleotides encoding such amino acid sequences and the complementary strand thereto.

[0079] Column 7 in Table 1A lists residues comprising epitopes contained in the polypeptides encoded by the preferred ORF (SEQ ID NO:Y), as predicted using the algorithm of Jameson and Wolf, (1988) Comp. Appl. Biosci. 4:181-186. The Jameson-Wolf antigenic analysis was performed using the computer program PROTEAN (Version 3.11 for the Power MacIntosh, DNASTAR, Inc., 1228 South Park Street Madison, Wis.). In specific embodiments, polypeptides of the invention comprise, or alternatively consist of, at least one, two, three, four, five or more of the predicted epitopes as described in Table 1A. It will be appreciated that depending on the analytical criteria used to predict antigenic determinants, the exact address of the determinant may vary slightly.

[0080] Column 8 in Table 1A provides an expression profile and library code: count for each of the contig sequences (SEQ ID NO:X) disclosed in Table 1A, which can routinely be combined with the information provided in Table 4 and used to determine the tissues, cells, and/or cell line libraries which predominantly express the polynucleotides of the invention. The first number in column 8 (preceding the colon), represents the tissue/cell source identifier code corresponding to the code and description provided in Table 4. For those identifier codes in which the first two letters are not “AR”, the second number in column 8 (following the colon) represents the number of times a sequence corresponding to the reference polynucleotide sequence was identified in the tissue/cell source. Those tissue/cell source identifier codes in which the first two letters are “AR” designate information generated using DNA array technology. Utilizing this technology, cDNAs were amplified by PCR and then transferred, in duplicate, onto the array. Gene expression was assayed through hybridization of first strand cDNA probes to the DNA array. cDNA probes were generated from total RNA extracted from a variety of different tissues and cell lines. Probe synthesis was performed in the presence of ³³P dCTP, using oligo(dT) to prime reverse transcription. After hybridization, high stringency washing conditions were employed to remove non-specific hybrids from the array. The remaining signal, emanating from each gene target, was measured using a Phosphorimager. Gene expression was reported as Phosphor Stimulating Luminescence (PSL) which reflects the level of phosphor signal generated from the probe hybridized to each of the gene targets represented on the array. A local background signal subtraction was performed before the total signal generated from each array was used to normalize gene expression between the different hybridizations. The value presented after “[array code]:” represents the mean of the duplicate values, following background subtraction and probe normalization. One of skill in the art could routinely use this information to identify normal and/or diseased tissue(s) which show a predominant expression pattern of the corresponding polynucleotide of the invention or to identify polynucleotides which show predominant and/or specific tissue and/or cell expression.

[0081] Column 9 in Table 1A provides a chromosomal map location for certain polynucleotides of the invention. Chromosomal location was determined by finding exact matches to EST and cDNA sequences contained in the NCBI (National Center for Biotechnology Information) UniGene database. Each sequence in the UniGene database is assigned to a “cluster”; all of the ESTs, cDNAs, and STSs in a cluster are believed to be derived from a single gene. Chromosomal mapping data is often available for one or more sequence(s) in a UniGene cluster; this data (if consistent) is then applied to the cluster as a whole. Thus, it is possible to infer the chromosomal location of a new polynucleotide sequence by determining its identity with a mapped UniGene cluster.

[0082] A modified version of the computer program BLASTN (Altshul et al., J. Mol. Biol. 215:403-410 (1990); and Gish and States, Nat. Genet. 3:266-272 (1993)) was used to search the UniGene database for EST or cDNA sequences that contain exact or near-exact matches to a polynucleotide sequence of the invention (the ‘Query’). A sequence from the UniGene database (the ‘Subject’) was said to be an exact match if it contained a segment of 50 nucleotides in length such that 48 of those nucleotides were in the same order as found in the Query sequence. If all of the matches that met this criteria were in the same UniGene cluster, and mapping data was available for this cluster, it is indicated in Table 1A under the heading “Cytologic Band”. Where a cluster had been further localized to a distinct cytologic band, that band is disclosed; where no banding information was available, but the gene had been localized to a single chromosome, the chromosome is disclosed.

[0083] Once a presumptive chromosomal location was determined for a polynucleotide of the invention, an associated disease locus was identified by comparison with a database of diseases which have been experimentally associated with genetic loci. The database used was the Morbid Map, derived from OMIMTM (supra). If the putative chromosomal location of a polynucleotide of the invention (Query sequence) was associated with a disease in the Morbid Map database, an OMIM reference identification number was noted in column 10, Table 1A, labelled “OMIM Disease Reference(s)”. Table 5 is a key to the OMIM reference identification numbers (column 1), and provides a description of the associated disease in Column 2.

[0084] Column 11 provides the amino acid position of the ALOM hit(s) predicted for the amino acid sequence shown in SEQ ID NO:Y. The polynucleotides of the invention are predicted to be plasma membrane associated and comprise the predicted INTEGRAL membrane domains shown in column 11 of Table 1A for each unique contig ID in the corresponding row of Table 1A.

TABLE 1B

| | SEQ | | | | |
|---|---|---|---|---|---|
| | ID | | | | |
| Clone ID | NO: | CONTIG | | SEQ ID | EXON |
| NO:Z | X | ID: | BAC ID: A | NO:B | From-To |
| HACCH94 | 12 | 847143 | AL161458 | 149 | 1-1140 |
| HACCH94 | 12 | 847143 | AL161458 | 150 | 1-90 |
| | | | | | 5811-6312 |
| HAMAC79 | 14 | 872774 | AC019066 | 151 | 1-1701 |
| HAMAC79 | 14 | 872774 | AC019066 | 152 | 1-203 |
| HBXAN27 | 16 | 823467 | AL390756 | 153 | 1-722 |
| HBXAN27 | 16 | 823467 | AL139130 | 154 | 1-722 |
| HBXAN27 | 16 | 823467 | AL390756 | 155 | 1-380 |
| HBXAN27 | 16 | 823467 | AL139130 | 156 | 1-380 |
| HBXAN27 | 16 | 823467 | AL139130 | 157 | 1-512 |
| HCEEI37 | 18 | 530915 | AL031658 | 158 | 1-463 |
| | | | | | 861-1394 |
| HCEPH84 | 19 | 910864 | AC013603 | 159 | 1-302 |
| | | | | | 692-1498 |
| | | | | | 2237-2673 |
| | | | | | 5316-5528 |
| | | | | | 6508-7733 |
| HDPIT61 | 22 | 741724 | AC004126 | 160 | 1-477 |
| HDPIT61 | 22 | 741724 | AC004126 | 161 | 1-54 |
| | | | | | 2731-3380 |
| | | | | | 3598-3872 |
| | | | | | 4237-4529 |
| | | | | | 4565-5042 |
| | | | | | 6520-6690 |
| | | | | | 7222-7369 |
| | | | | | 8897-9011 |
| | | | | | 9754-9920 |
| | | | | | 11404-11792 |
| | | | | | 12816-13651 |
| | | | | | 13671-14981 |
| | | | | | 14996-15184 |
| | | | | | 15601-15795 |
| | | | | | 16283-16943 |
| | | | | | 17040-17505 |
| | | | | | 18915-19066 |
| | | | | | 19160-19363 |
| | | | | | 20386-20534 |
| | | | | | 22085-22420 |
| | | | | | 23187-23408 |
| | | | | | 23626-23842 |
| | | | | | 24043-24572 |
| | | | | | 26313-26555 |
| HDQHZ22 | 26 | 879416 | AL158048 | 162 | 1-730 |
| | | | | | 1351-1559 |
| | | | | | 1659-2178 |
| HDQHZ22 | 26 | 879416 | AL158048 | 163 | 1-521 |
| HDTBL45 | 27 | 785534 | AL159163 | 164 | 1-62 |
| | | | | | 3028-3159 |
| | | | | | 3731-4202 |
| | | | | | 5811-5871 |
| | | | | | 6104-6243 |
| | | | | | 6700-6969 |
| | | | | | 7128-7415 |
| | | | | | 7633-9533 |
| | | | | | 10360-10492 |
| | | | | | 11492-11681 |
| | | | | | 12072-12484 |
| | | | | | 13542-14028 |
| | | | | | 14071-14553 |
| | | | | | 18412-18511 |
| | | | | | 18529-19185 |
| | | | | | 20422-21507 |
| | | | | | 22310-22692 |
| | | | | | 22758-22889 |
| HDTBL45 | 27 | 785534 | AL159163 | 165 | 1-869 |
| HDTIF01 | 28 | 883070 | AC008457 | 166 | 1-237 |
| HDTIF01 | 28 | 883070 | AC025884 | 167 | 1-283 |
| HDTIF01 | 28 | 883070 | AL139382 | 168 | 1-285 |
| HDTIF01 | 28 | 883070 | AP000631 | 169 | 1-293 |
| HDTIF01 | 28 | 883070 | AP002749 | 170 | 1-229 |
| HDTIF01 | 28 | 883070 | AP002434 | 171 | 1-169 |
| HDTIF01 | 28 | 883070 | AC027146 | 172 | 1-301 |
| HDTIF01 | 28 | 883070 | AC023671 | 173 | 1-150 |
| HDTIF01 | 28 | 883070 | AC025054 | 174 | 1-301 |
| HDTIF01 | 28 | 883070 | AC023945 | 175 | 1-279 |
| HDTIF01 | 28 | 883070 | AL157876 | 176 | 1-204 |
| HDTIF01 | 28 | 883070 | AC024490 | 177 | 1-232 |
| HDTIF01 | 28 | 883070 | AP001903 | 178 | 1-208 |
| HDTIF01 | 28 | 883070 | AC025382 | 179 | 1-90 |
| | | | | | 107-158 |
| HDTIF01 | 28 | 883070 | AC034110 | 180 | 1-236 |
| HDTIF01 | 28 | 883070 | AP001143 | 181 | 1-238 |
| HDTIF01 | 28 | 883070 | AC021834 | 182 | 1-233 |
| HDTIF01 | 28 | 883070 | AP000755 | 183 | 1-249 |
| HDTIF01 | 28 | 883070 | AC012274 | 184 | 1-142 |
| HDTIF01 | 28 | 883070 | AC021438 | 185 | 1-253 |
| HDTIF01 | 28 | 883070 | AC023137 | 186 | 1-297 |
| HDTIF01 | 28 | 883070 | AC051663 | 187 | 1-267 |
| HDTIF01 | 28 | 883070 | AC011039 | 188 | 1-231 |
| HDTIF01 | 28 | 883070 | AC012510 | 189 | 1-145 |
| HDTIF01 | 28 | 883070 | AL391063 | 190 | 1-214 |
| HDTIF01 | 28 | 883070 | AP001898 | 191 | 1-213 |
| HDTIF01 | 28 | 883070 | AP002421 | 192 | 1-279 |
| HDTIF01 | 28 | 883070 | AC013558 | 193 | 1-247 |
| HDTIF01 | 28 | 883070 | AC025287 | 194 | 1-144 |
| HDTIF01 | 28 | 883070 | AP001791 | 195 | 1-276 |
| HDTIF01 | 28 | 883070 | AP001915 | 196 | 1-209 |
| HDTIF01 | 28 | 883070 | AP002344 | 197 | 1-311 |
| HDTIF01 | 28 | 883070 | AL357141 | 198 | 1-306 |
| HDTIF01 | 28 | 883070 | AP000831 | 199 | 1-152 |
| HDTIF01 | 28 | 883070 | AP001200 | 200 | 1-141 |
| HDTIF01 | 28 | 883070 | AP001936 | 201 | 1-239 |
| HDTIF01 | 28 | 883070 | AP001849 | 202 | 1-169 |
| HDTIF01 | 28 | 883070 | AC067909 | 203 | 1-223 |
| HDTIF01 | 28 | 883070 | AC069239 | 204 | 1-173 |
| HDTIF01 | 28 | 883070 | AP000818 | 205 | 1-283 |
| HDTIF01 | 28 | 883070 | AP000826 | 206 | 1-304 |
| HDTIF01 | 28 | 883070 | AP001588 | 207 | 1-230 |
| HDTIF01 | 28 | 883070 | AP001835 | 208 | 1-276 |
| HDTIF01 | 28 | 883070 | AC020664 | 209 | 1-229 |
| HDTIF01 | 28 | 883070 | AC027230 | 210 | 1-140 |
| HDTIF01 | 28 | 883070 | AC078843 | 211 | 1-314 |
| HDTIF01 | 28 | 883070 | AC069581 | 212 | 1-250 |
| HDTIF01 | 28 | 883070 | AP000926 | 213 | 1-201 |
| HDTIF01 | 28 | 883070 | AC022626 | 214 | 1-283 |
| HDTIF01 | 28 | 883070 | AC044899 | 215 | 1-288 |
| HDTIF01 | 28 | 883070 | AP001936 | 216 | 1-247 |
| HDTIF01 | 28 | 883070 | AC015992 | 217 | 1-239 |
| HDTIF01 | 28 | 883070 | AC025829 | 218 | 1-288 |
| HDTIF01 | 28 | 883070 | AC027153 | 219 | 1-228 |
| HDTIF01 | 28 | 883070 | AP002365 | 220 | 1-234 |
| HDTIF01 | 28 | 883070 | AL390024 | 221 | 1-310 |
| HDTIF01 | 28 | 883070 | AC027479 | 222 | 1-290 |
| HDTIF01 | 28 | 883070 | AP000881 | 223 | 1-303 |
| HDTIF01 | 28 | 883070 | AC009144 | 224 | 1-229 |
| HDTIF01 | 28 | 883070 | AC013733 | 225 | 1-299 |
| HDTIF01 | 28 | 883070 | AP001097 | 226 | 1-278 |
| HDTIF01 | 28 | 883070 | AC016928 | 227 | 1-312 |
| | | | | | 673-2136 |
| HDTIF01 | 28 | 883070 | AC013613 | 228 | 1-279 |
| HDTIF01 | 28 | 883070 | AC015999 | 229 | 1-168 |
| HDTIF01 | 28 | 883070 | AP001892 | 230 | 1-156 |
| HDTIF01 | 28 | 883070 | AC023910 | 231 | 1-1166 |
| HDTIF01 | 28 | 883070 | AC006512 | 232 | 1-247 |
| | | | | | 2812-2918 |
| | | | | | 3488-3953 |
| | | | | | 3964-4527 |
| | | | | | 4683-5151 |
| | | | | | 5330-9121 |
| | | | | | 9884-10335 |
| | | | | | 10748-10781 |
| | | | | | 10960-11055 |
| | | | | | 11323-12111 |
| | | | | | 12127-12791 |
| | | | | | 12911-13262 |
| | | | | | 13266-13791 |
| | | | | | 14696-14866 |
| | | | | | 15107-15207 |
| | | | | | 16551-16955 |
| | | | | | 17174-17614 |
| | | | | | 18504-18749 |
| | | | | | 19392-19660 |
| | | | | | 19720-20075 |
| | | | | | 20785-21233 |
| | | | | | 21290-21733 |
| | | | | | 23618-23649 |
| | | | | | 23982-24188 |
| | | | | | 24481-24573 |
| | | | | | 24741-25003 |
| | | | | | 26591-26705 |
| | | | | | 26738-27249 |
| | | | | | 28479-28858 |
| | | | | | 29065-31669 |
| | | | | | 31926-32887 |
| | | | | | 33667-34293 |
| | | | | | 35229-35682 |
| | | | | | 38114-38771 |
| HDTIF01 | 28 | 883070 | AL390024 | 233 | 1-298 |
| | | | | | 632-842 |
| HDTIF01 | 28 | 883070 | AP000881 | 234 | 1-49 |
| HDTIF01 | 28 | 883070 | AP001097 | 235 | 1-118 |
| HDTIF01 | 28 | 883070 | AC027146 | 236 | 1-160 |
| HDTIF01 | 28 | 883070 | AC034110 | 237 | 1-159 |
| HDTIF01 | 28 | 883070 | AC016928 | 238 | 1-264 |
| HDTIF01 | 28 | 883070 | AC012510 | 239 | 1-106 |
| | | | | | 1213-1470 |
| HDTIF01 | 28 | 883070 | AC015999 | 240 | 1-428 |
| HDTIF01 | 28 | 883070 | AC016928 | 241 | 1-328 |
| HDTIF01 | 28 | 883070 | AC023910 | 242 | 1-251 |
| HDTIF01 | 28 | 883070 | AC023910 | 243 | 1-328 |
| HDTIF01 | 28 | 883070 | AC006512 | 244 | 1-818 |
| | | | | | 963-1440 |
| | | | | | 1469-1958 |
| | | | | | 2220-3076 |
| | | | | | 3455-3663 |
| | | | | | 3931-4285 |
| | | | | | 4549-4632 |
| | | | | | 4696-5069 |
| | | | | | 5245-5337 |
| | | | | | 5461-5775 |
| HDTIF01 | 28 | 883070 | AC006512 | 245 | 1-738 |
| HE6AK76 | 29 | 890690 | AC006133 | 246 | 1-57 |
| | | | | | 219-620 |
| | | | | | 1219-1525 |
| | | | | | 2110-2187 |
| | | | | | 2646-2941 |
| | | | | | 4709-4962 |
| HFIHE47 | 36 | 857988 | AC021097 | 247 | 1-1803 |
| | | | | | 2560-3406 |
| | | | | | 3921-4106 |
| | | | | | 4155-6674 |
| | | | | | 6911-7014 |
| | | | | | 7135-7264 |
| | | | | | 7522-8788 |
| HMCDN22 | 47 | 895981 | AC018720 | 248 | 1-31 |
| | | | | | 538-649 |
| | | | | | 3059-5197 |
| HMCDN22 | 47 | 895981 | AC006014 | 249 | 1-510 |
| | | | | | 524-611 |
| | | | | | 1964-2174 |
| | | | | | 2176-2386 |
| | | | | | 2725-3091 |
| | | | | | 3571-4379 |
| | | | | | 4944-8448 |
| | | | | | 8662-8763 |
| | | | | | 8921-9848 |
| | | | | | 9940-13266 |
| | | | | | 13498-14426 |
| HMCDN22 | 47 | 895981 | AC004867 | 250 | 1-514 |
| | | | | | 1077-1384 |
| | | | | | 1940-2295 |
| | | | | | 2754-3119 |
| | | | | | 3278-3357 |
| | | | | | 3601-4409 |
| | | | | | 4973-8539 |
| | | | | | 8651-9863 |
| | | | | | 9955-11495 |
| | | | | | 11594-13304 |
| | | | | | 13581-14448 |
| HMCDN22 | 47 | 895981 | AC005488 | 251 | 1-511 |
| | | | | | 1097-1213 |
| | | | | | 1909-2384 |
| | | | | | 2718-3084 |
| | | | | | 3507-4370 |
| | | | | | 4933-8440 |
| | | | | | 8629-9839 |
| | | | | | 9931-11469 |
| | | | | | 11566-13274 |
| | | | | | 13551-14417 |
| HMCDN22 | 47 | 895981 | AC005098 | 252 | 1-515 |
| | | | | | 1128-1244 |
| | | | | | 1941-2296 |
| | | | | | 2755-3120 |
| | | | | | 3270-3349 |
| | | | | | 3593-4401 |
| | | | | | 4967-6172 |
| | | | | | 6243-8522 |
| | | | | | 8634-9846 |
| | | | | | 9938-11478 |
| | | | | | 11577-13284 |
| | | | | | 13561-14426 |
| HMCDN22 | 47 | 895981 | AC004166 | 253 | 1-514 |
| | | | | | 1940-2295 |
| | | | | | 2754-3119 |
| | | | | | 3278-3357 |
| | | | | | 3601-4409 |
| | | | | | 4973-8539 |
| | | | | | 8651-9863 |
| | | | | | 9955-11495 |
| | | | | | 11594-13306 |
| | | | | | 13584-14451 |
| HMCDN22 | 47 | 895981 | AC018720 | 254 | 1-166 |
| HMCDN22 | 47 | 895981 | AC006014 | 255 | 1-1726 |
| | | | | | 3627-4048 |
| | | | | | 4059-4312 |
| | | | | | 5346-5456 |
| | | | | | 5623-5710 |
| | | | | | 7593-8151 |
| | | | | | 8598-8849 |
| | | | | | 9371-9890 |
| | | | | | 9951-10564 |
| | | | | | 10935-11192 |
| | | | | | 11237-11345 |
| | | | | | 12328-12542 |
| | | | | | 12961-13263 |
| | | | | | 13440-13739 |
| | | | | | 14069-15193 |
| | | | | | 15440-17563 |
| | | | | | 17651-17906 |
| | | | | | 17908-21108 |
| | | | | | 21116-25595 |
| | | | | | 27175-29036 |
| | | | | | 29456-30388 |
| | | | | | 30661-31166 |
| | | | | | 31410-32017 |
| | | | | | 33124-33424 |
| | | | | | 33591-33678 |
| | | | | | 35258-36175 |
| | | | | | 36666-36809 |
| | | | | | 37536-39068 |
| HMCDN22 | 47 | 895981 | AC006014 | 256 | 1-108 |
| HMCDN22 | 47 | 895981 | AC004867 | 257 | 1-207 |
| HMCDN22 | 47 | 895981 | AC004867 | 258 | 1-1542 |
| | | | | | 1626-5294 |
| | | | | | 5528-5728 |
| | | | | | 5790-10288 |
| | | | | | 10310-10375 |
| | | | | | 10526-10833 |
| | | | | | 11230-11858 |
| | | | | | 11861-15235 |
| | | | | | 15357-15777 |
| | | | | | 16282-16990 |
| | | | | | 17664-17964 |
| | | | | | 18131-18218 |
| | | | | | 19801-20780 |
| | | | | | 21112-21364 |
| | | | | | 21898-23613 |
| HMCDN22 | 47 | 895981 | AC005488 | 259 | 1-108 |
| HMCDN22 | 47 | 895981 | AC005098 | 260 | 1-207 |
| HMCDN22 | 47 | 895981 | AC005488 | 261 | 1-1055 |
| | | | | | 1744-2558 |
| | | | | | 3627-4048 |
| | | | | | 4059-4312 |
| | | | | | 5201-5501 |
| | | | | | 5668-5755 |
| | | | | | 7640-8198 |
| | | | | | 8648-8789 |
| | | | | | 9445-10573 |
| | | | | | 11009-11266 |
| | | | | | 11311-11419 |
| | | | | | 13039-13445 |
| | | | | | 13518-13817 |
| | | | | | 14321-15269 |
| | | | | | 15542-17560 |
| | | | | | 18004-21187 |
| | | | | | 21195-21921 |
| | | | | | 22001-24582 |
| | | | | | 24590-25674 |
| | | | | | 25697-25886 |
| | | | | | 25920-26227 |
| | | | | | 26300-26517 |
| | | | | | 27004-27241 |
| | | | | | 27247-30243 |
| | | | | | 30743-31163 |
| | | | | | 31492-32101 |
| | | | | | 33177-33477 |
| | | | | | 33644-33730 |
| | | | | | 35309-36288 |
| | | | | | 37586-39110 |
| HMCDN22 | 47 | 895981 | AC004166 | 262 | 1-207 |
| HMCDN22 | 47 | 895981 | AC005098 | 263 | 1-2122 |
| | | | | | 2216-5883 |
| | | | | | 6116-6317 |
| | | | | | 6384-10882 |
| | | | | | 10904-10969 |
| | | | | | 11120-11427 |
| | | | | | 11506-11724 |
| | | | | | 11833-12461 |
| | | | | | 12464-15689 |
| | | | | | 15962-16382 |
| | | | | | 16887-17595 |
| | | | | | 18270-18570 |
| | | | | | 18737-18824 |
| | | | | | 20405-21322 |
| | | | | | 21718-21859 |
| | | | | | 22503-24218 |
| HMCDN22 | 47 | 895981 | AC004166 | 264 | 1-1542 |
| | | | | | 1619-5287 |
| | | | | | 5588-5721 |
| | | | | | 5783-6904 |
| | | | | | 6935-10281 |
| | | | | | 10303-10368 |
| | | | | | 10519-10826 |
| | | | | | 11223-11851 |
| | | | | | 11854-15228 |
| | | | | | 15350-15770 |
| | | | | | 16275-16983 |
| | | | | | 17657-17957 |
| | | | | | 18124-18211 |
| | | | | | 19794-20773 |
| | | | | | 21106-21247 |
| | | | | | 21888-23603 |
| HNGIY79 | 51 | 775229 | Z99714 | 265 | 1-681 |
| | | | | | 872-1110 |
| | | | | | 5628-5862 |
| | | | | | 6527-6890 |
| | | | | | 7072-7126 |
| | | | | | 7298-7377 |
| | | | | | 8382-8527 |
| | | | | | 9085-9174 |
| | | | | | 9201-11617 |
| HNGIY79 | 51 | 775229 | Z99714 | 266 | 1-576 |
| HNGMJ89 | 52 | 786340 | AC011443 | 267 | 1-566 |
| HNGMJ89 | 52 | 786340 | AC011443 | 268 | 1-64 |
| | | | | | 151-198 |
| | | | | | 1115-1214 |
| | | | | | 1417-1483 |
| | | | | | 2295-2437 |
| | | | | | 2569-2613 |
| | | | | | 3052-3352 |
| | | | | | 3471-3834 |
| | | | | | 4185-4727 |
| | | | | | 4775-5443 |
| | | | | | 5806-6202 |
| HNHAG26 | 53 | 866694 | AC074220 | 269 | 1-839 |
| HNHAG26 | 53 | 866694 | AC073351 | 270 | 1-365 |
| HNHKN73 | 55 | 762011 | AC016498 | 271 | 1-687 |
| HNHKN73 | 55 | 762011 | AC016498 | 272 | 1-225 |
| HPMED52 | 59 | 531347 | AC005004 | 273 | 1-1352 |
| HPMED52 | 59 | 531347 | AC005004 | 274 | 1-184 |
| HPMED52 | 59 | 531347 | AC005004 | 275 | 1-149 |
| HROAI61 | 64 | 742084 | AC021619 | 276 | 1-307 |
| | | | | | 894-1359 |
| | | | | | 1488-1593 |
| | | | | | 1791-2124 |
| | | | | | 4206-4373 |
| | | | | | 4719-4843 |
| | | | | | 5364-5447 |
| | | | | | 5480-5618 |
| | | | | | 7701-7808 |
| | | | | | 7883-8205 |
| HSKJR15 | 68 | 866396 | AC015844 | 277 | 1-134 |
| | | | | | 226-628 |
| | | | | | 700-974 |
| | | | | | 1061-1542 |
| HTNBE16 | 72 | 667653 | AC010799 | 278 | 1-113 |
| | | | | | 284-1123 |
| | | | | | 1141-1864 |
| | | | | | 2352-2764 |
| | | | | | 3594-3932 |
| | | | | | 5605-6252 |
| HTNBE16 | 72 | 667653 | AC009673 | 279 | 1-113 |
| | | | | | 285-1126 |
| | | | | | 1144-1866 |
| | | | | | 2354-2766 |
| | | | | | 3599-3937 |
| | | | | | 5610-6254 |
| HTNBE16 | 72 | 667653 | AC009673 | 280 | 1-90 |
| | | | | | 102-556 |
| | | | | | 560-685 |
| HTNBE16 | 72 | 667653 | AC010799 | 281 | 1-190 |
| HWBAO18 | 79 | 751125 | AL136222 | 282 | 1-35 |
| | | | | | 90-146 |
| | | | | | 603-976 |
| | | | | | 1504-1816 |
| | | | | | 1908-2118 |
| | | | | | 2389-2496 |
| | | | | | 3139-4163 |
| | | | | | 5195-5455 |
| | | | | | 5670-5784 |
| | | | | | 5971-6356 |
| | | | | | 6876-7025 |
| | | | | | 7363-7661 |
| HWBAO18 | 79 | 751125 | AL109947 | 283 | 1-35 |
| | | | | | 90-146 |
| | | | | | 603-976 |
| | | | | | 1504-1816 |
| | | | | | 1908-2118 |
| | | | | | 2389-2496 |
| | | | | | 3139-4163 |
| | | | | | 5195-5455 |
| | | | | | 5670-5784 |
| | | | | | 5971-6356 |
| | | | | | 6875-7024 |
| | | | | | 7362-8082 |
| | | | | | 8097-9620 |
| | | | | | 9776-9985 |
| | | | | | 10108-10621 |
| | | | | | 10759-10899 |
| | | | | | 10954-11030 |
| | | | | | 11405-11696 |
| HWBAO18 | 79 | 751125 | AL359711 | 284 | 1-35 |
| | | | | | 90-146 |
| | | | | | 603-976 |
| | | | | | 1504-1816 |
| | | | | | 1908-2118 |
| | | | | | 2389-2496 |
| | | | | | 3139-4163 |
| | | | | | 5195-5455 |
| | | | | | 5670-5784 |
| | | | | | 5971-6356 |
| | | | | | 6875-7024 |
| | | | | | 7362-8082 |
| | | | | | 8097-9620 |
| | | | | | 9776-9985 |
| | | | | | 10108-10621 |
| | | | | | 10759-10899 |
| | | | | | 10954-11030 |
| | | | | | 11405-11696 |
| HWBAO18 | 79 | 751125 | AL136222 | 285 | 1-532 |
| HWBAO18 | 79 | 751125 | AL109947 | 286 | 1-479 |
| | | | | | 502-655 |
| | | | | | 841-948 |
| | | | | | 1038-1393 |
| | | | | | 1624-1713 |
| | | | | | 1856-1951 |
| | | | | | 2057-2373 |
| | | | | | 2467-2567 |
| | | | | | 2696-3160 |
| HWBAO18 | 79 | 751125 | AL359711 | 287 | 1-479 |
| | | | | | 502-655 |
| | | | | | 841-948 |
| | | | | | 1038-1393 |
| | | | | | 1624-1713 |
| | | | | | 1856-1951 |
| | | | | | 2057-2373 |
| | | | | | 2467-2567 |
| | | | | | 2696-3160 |
| HWBAO18 | 79 | 751125 | AL109947 | 288 | 1-532 |
| HWBAO18 | 79 | 751125 | AL359711 | 289 | 1-532 |

[0085] Table 1B summarizes additional polynucleotides encompassed by the invention (including cDNA clones related to the sequences (Clone ID NO:Z), contig sequences (contig identifier (Contig ID:) contig nucleotide sequence identifiers (SEQ ID NO:X)), and genomic sequences (SEQ ID NO:B). The first column provides a unique clone identifier, “Clone ID NO:Z”, for a cDNA clone related to each contig sequence. The second column provides the sequence identifier, “SEQ ID NO:X”, for each contig sequence. The third column provides a unique contig identifier, “Contig ID:” for each contig sequence. The fourth column, provides a BAC identifier “BAC ID NO:A” for the BAC clone referenced in the corresponding row of the table. The fifth column provides the nucleotide sequence identifier, “SEQ ID NO:B” for a fragment of the BAC clone identified in column four of the corresponding row of the table. The sixth column, “Exon From-To”, provides the location (i.e., nucleotide position numbers) within the polynucleotide sequence of SEQ ID NO:B which delineate certain polynucleotides of the invention that are also exemplary members of polynucleotide sequences that encode polypeptides of the invention (e.g., polypeptides containing amino acid sequences encoded by the polynucleotide sequences delineated in column six, and fragments and variants thereof).

TABLE 2

| | | SEQ | | | | Score/ | | |
|---|---|---|---|---|---|---|---|---|
| Clone ID | Contig | ID | Analysis | | PFam/NR Accession | Percent | NT | NT |
| NO:Z | ID: | NO:X | Method | PFam/NR Description | Number | Identity | From | To |
| H7TBC95 | 865922 | 11 | HMMER | PFAM: 7 | PF00001 | 189.5 | 3 | 695 |
| | | | 2.1.1 | transmembrane | | | | |
| | | | | receptor (rhodopsin | | | | |
| | | | | family) | | | | |
| | | | blastx.2 | G-protein coupled | sp\|BAA93001\|BAA9 | 56% | 516 | 701 |
| | | | | receptor SALPR. | 3001 | 61% | 51 | 206 |
| | | | | | | 41% | 303 | 440 |
| HACCH94 | 847143 | 12 | HMMER | PFAM: 7 | PF00001 | 167.94 | 10 | 735 |
| | | | 1.8 | transmembrane | | | | |
| | | | | receptor (rhodopsin | | | | |
| | | | | family) | | | | |
| | | | blastx.2 | ORPHAN G | sp\|O95853\|O95853 | 99% | 7 | 879 |
| | | | | PROTEIN-COUPLED | | | | |
| | | | | RECEPTOR. | | | | |
| HAIBU93 | 907830 | 13 | HMMER | PFAM: IBR domain | PF01485 | 82.3 | 214 | 411 |
| | | | 2.1.1 | | | | | |
| | | | blastx.2 | (AF120206) XY body | gb\|AAF18302.1\|AF1 | 68% | 10 | 1485 |
| | | | | protein [Mus musculus] | 20206 1 | | | |
| HBCMD49 | 865314 | 15 | HMMER | PFAM: Enoyl-CoA | PF00378 | 74.6 | 263 | 550 |
| | | | 2.1.1 | hydratase/isomerase | | | | |
| | | | | family | | | | |
| | | | blastx.2 | (AE000989) enoyl- | gb\|AAB89601.1\| | 39% | 197 | 619 |
| | | | | CoA hydratase (fad-4) | | | | |
| | | | | [Archaeoglobus | | | | |
| | | | | fulgidus] | | | | |
| HBXCM38 | 910086 | 17 | HMMER | PFAM: Src homology | PF00018 | 55.89 | 1062 | 1232 |
| | | | 1.8 | domain 3 | | | | |
| | | | blastx.2 | unnamed protein | emb\|CAB69447.1\| | 92% | 402 | 1316 |
| | | | | product [unidentified] | | 87% | 13 | 396 |
| | | | | | | 77% | 1295 | 1348 |
| HCEPH84 | 910864 | 19 | HMMER | PFAM: Dual | PF00782 | 136.4 | 1158 | 727 |
| | | | 2.1.1 | specificity phosphatase, | | | | |
| | | | | catalytic domain | | | | |
| | | | blastx.2 | PROTEIN | sp\|Q9UII6\|Q9UII6 | 50% | 1251 | 757 |
| | | | | PHOSPHATASE. | | | | |
| HCWTB56 | 853009 | 21 | HMMER | PFAM: E1-E2 | PF00122 | 55.15 | 2 | 301 |
| | | | 1.8 | ATPases | | | | |
| | | | blastx.2 | cadmium resistance | gb\|AAB37345.1\| | 42% | 2 | 316 |
| | | | | protein [Lactococcus | | | | |
| | | | | lactis] | | | | |
| HDPIT61 | 741724 | 22 | blastx.2 | (AF121080) cAMP | gb\|AAD24570.1\|AF1 | 73% | 48 | 329 |
| | | | | inducible 1 protein | 21080_1 | 57% | 293 | 397 |
| | | | | [Mus musculus] | | | | |
| HDPMA48 | 582015 | 23 | blastx.2 | (AF038007) FIC1 | gb\|AAC63461.1\| | 54% | 152 | 703 |
| | | | | [Homo sapiens] | | | | |
| HDPVY34 | 839178 | 24 | HMMER | PFAM: ABC | PF000O5 | 159.82 | 163 | 693 |
| | | | 1.8 | transporters | | | | |
| | | | blastx.2 | ATP-binding cassette | sp\|AAF31432\|AAF31 | 74% | 535 | 927 |
| | | | | protein (Fragment). | 432 | 75% | 926 | 961 |
| HDQDY52 | 852622 | 25 | HMMER | PFAM: AMP-binding | PF00501 | 82.8 | 316 | 555 |
| | | | 1.8 | enzymes | | | | |
| | | | blastx.2 | (AL049709) dJ18C9.1 | emb\|CAB61786.1\| | 84% | 85 | 690 |
| | | | | (similar to acetyl- | | 81% | 566 | 778 |
| | | | | coenzyme A | | 55% | 705 | 785 |
| | | | | synthetase) [Homo | | | | |
| | | | | sapiens] | | | | |
| HDQHZ22 | 879416 | 26 | blastx.2 | cysteine rich hair | emb\|CAA56339.1\| | 40% | 65 | 319 |
| | | | | keratin associated | | 42% | 65 | 352 |
| | | | | protein [Oryctolagus | | | | |
| | | | | cuniculus] | | | | |
| HDTIF01 | 883070 | 28 | blastx.2 | (AF010144) neuronal | gb\|AAC08737.1\| | 61% | 315 | 524 |
| | | | | thread protein AD7c- | | 61% | 309 | 509 |
| | | | | NTP [Homo sapiens] | | 65% | 361 | 507 |
| | | | | | | 62% | 34 | 162 |
| | | | | | | 60% | 53 | 172 |
| | | | | | | 41% | 304 | 507 |
| | | | | | | 35% | 286 | 507 |
| | | | | | | 40% | 327 | 473 |
| | | | | | | 50% | 50 | 151 |
| | | | | | | 57% | 89 | 166 |
| | | | | | | 47% | 109 | 171 |
| | | | | | | 37% | 308 | 379 |
| | | | | | | 52% | 128 | 178 |
| HE6AK76 | 890690 | 29 | HMMER | PFAM: Vertebrate | PF00337 | 87.9 | 179 | 496 |
| | | | 2.1.1 | galactoside-binding | | | | |
| | | | | lectins | | | | |
| | | | blastx.2 | (AF117383) placental | gb\|AAF22001.1\|AF1 | 67% | 125 | 520 |
| | | | | protein 13; PP13 | 17383_1 | | | |
| | | | | [Homo sapiens] | | | | |
| HEGAN70 | 839719 | 30 | HMMER | PFAM: AMP-binding | PF00501 | 18.6 | 334 | 516 |
| | | | 1.8 | enzymes | | | | |
| | | | blastx.2 | Hypothetical 179.7 kDa | sp\|AAF64300\|AAF64 | 61% | 124 | 654 |
| | | | | protein. | 300 | 85% | 31 | 111 |
| | | | | | | 34% | 295 | 579 |
| | | | | | | 54% | 748 | 846 |
| HELFN75 | 658681 | 31 | blastx.2 | Molybdenum transport | dbj\|BAA35428.1\| | 100% | 288 | 635 |
| | | | | system permease | | | | |
| | | | | protein ModB. | | | | |
| | | | | [Escherichia coli] | | | | |
| HELGD12 | 695717 | 32 | HMMER | PFAM: Binding- | PF00528 | 38.3 | 857 | 985 |
| | | | 2.1.1 | protein-dependent | | | | |
| | | | | transport systems inner | | | | |
| | | | | membrane component | | | | |
| | | | blastx.2 | Putrescine transport | dbj\|BAA15071.1\| | 99% | 539 | 985 |
| | | | | system permease | | 100% | 244 | 492 |
| | | | | protein PotH. | | 40% | 492 | 698 |
| | | | | [Escherichia coli] | | | | |
| HELGW31 | 610003 | 33 | HMMER | PFAM: Cytochrome C | PF01578 | 216.5 | 672 | 1286 |
| | | | 2.1.1 | assembly protein | | | | |
| | | | blastx.2 | (AE000309) heme | gb\|AAC75259.1\| | 100% | 603 | 1337 |
| | | | | exporter protein C | | | | |
| | | | | [Escherichia coli] | | | | |
| HETKH30 | 884009 | 34 | HMMER | PFAM: Alcohol/other | PF00106 | 137.09 | 300 | 881 |
| | | | 1.8 | dehydrogenases, short | | | | |
| | | | | chain type | | | | |
| | | | blastx.2 | PUTATIVE STEROID | sp\|O57314\|DHBX_A | 54% | 294 | 866 |
| | | | | DEHYDROGENASE | NAPL | | | |
| | | | | SPM2 (EC 1.1.1.-). | | | | |
| HFIHE47 | 857988 | 36 | blastx.2 | weak similarity to ATP | gb\|AAA50619.1\| | 27% | 733 | 1644 |
| | | | | synthase B chain | | 37% | 403 | 687 |
| | | | | [Caenorhabditis | | | | |
| | | | | elegans] | | | | |
| HFRBN81 | 833061 | 37 | HMMER | PFAM: Sugar (and | PF00083 | 35.69 | 52 | 420 |
| | | | 1.8 | other) transporters | | | | |
| | | | blastx.2 | Hypothetical protein Y | dbj\|BAA35630.1\| | 100% | 1 | 1116 |
| | | | | [Escherichia coli] | | | | |
| HHPDZ65 | 890894 | 39 | HMMER | PFAM: Amiloride- | PF00858 | 116.3 | 25 | 288 |
| | | | 2.1.1 | sensitive sodium | | | | |
| | | | | channel | | | | |
| | | | blastx.2 | (AJ242554) SPASIC | emb\|CAB61836.1\| | 89% | 10 | 342 |
| | | | | protein [Rattus | | 78% | 326 | 448 |
| | | | | norvegicus] | | | | |
| HHSAD81 | 847391 | 40 | HMMER | PFAM: Integral | PF00892 | 126.7 | 1517 | 1110 |
| | | | 2.1.1 | membrane protein | | | | |
| | | | blastx.2 | ORF_ID:o306#4; | dbj\|BAA15223.1\| | 100% | 2 | 676 |
| | | | | similar to [SwissProt | | | | |
| | | | | Accession Number | | | | |
| | | | | P31125] [Escherichia | | | | |
| | | | | coli] | | | | |
| HJBBP54 | 869621 | 41 | HMMER | PFAM: Helicases | PF00271 | 10.61 | 3 | 170 |
| | | | 1.8 | conserved C-terminal | | | | |
| | | | | domain | | | | |
| | | | blastx.2 | (AC005314) putative | gb\|AAC36188.1\| | 54% | 3 | 563 |
| | | | | pre-mRNA splicing | | | | |
| | | | | factor RNA helicase | | | | |
| | | | | [Arabidopsis thaliana] | | | | |
| HKAAR71 | 863023 | 42 | HMMER | PFAM: C2 domain | PF00168 | 16.26 | 309 | 551 |
| | | | 1.8 | | | | | |
| | | | blastx.2 | TOLLIP PROTEIN. | sp\|Q9UJ69\|Q9UJ69 | 78% | 147 | 959 |
| HLJDW02 | 837592 | 43 | HMMER | PFAM: Eukaryotic | PF00026 | 134.5 | 65 | 412 |
| | | | 2.1.1 | aspartyl protease | | | | |
| | | | blastx.2 | (AF090386) napsin A | gb\|AAD04917.1\| | 100% | 47 | 433 |
| | | | | [Homo sapiens] | | 65% | 433 | 534 |
| HLWDW80 | 879159 | 44 | HMMER | PFAM: | PF01534 | 209.9 | 3 | 347 |
| | | | 2.1.1 | Frizzled/Smoothened | | | | |
| | | | | family membrane | | | | |
| | | | | region | | | | |
| | | | blastx.2 | frizzled-3 protein - | pir\|JC7312\|JC7312 | 97% | 3 | 629 |
| | | | | human | | | | |
| HMAIA55 | 899404 | 46 | blastx.2 | (AF027204) putative | gb\|AAB82947.1\| | 35% | 188 | 532 |
| | | | | tetraspan | | 39% | 601 | 789 |
| | | | | transmembrane protein | | | | |
| | | | | L6H [Homo sapiens] | | | | |
| HMCDN22 | 895981 | 47 | blastx.2 | (AJ007798) stromal | emb\|CAB59367.1\| | 82% | 85 | 456 |
| | | | | antigen 3, (STAG3) | | 90% | 445 | 573 |
| | | | | [Homo sapiens] | | 71% | 10 | 168 |
| HMELR71 | 907836 | 48 | HMMER | PFAM: WD domain, | PF00400 | 96.7 | 1126 | 1236 |
| | | | 2.1.1 | G-beta repeat | | | | |
| | | | blastx.2 | (AK001667) unnamed | dbj\|BAA91822.1\| | 98% | 190 | 1236 |
| | | | | protein product [Homo | | 31% | 760 | 1161 |
| | | | | sapiens] | | 32% | 910 | 1251 |
| | | | | | | 100% | 113 | 196 |
| | | | | | | 21% | 745 | 1236 |
| | | | | | | 23% | 721 | 987 |
| HNFCS26 | 899406 | 49 | HMMER | PFAM: 7 | PF00002 | 249.7 | 146 | 853 |
| | | | 2.1.1 | transmembrane | | | | |
| | | | | receptor (Secretin | | | | |
| | | | | family) | | | | |
| | | | blastx.2 | (AC004262) R29368_2 | gb\|AAC05172.1\| | 81% | 137 | 955 |
| | | | | [Homo sapiens] | | | | |
| HNGFK28 | 544726 | 50 | HMMER | PFAM: ABC | PF00005 | 86.07 | 445 | 654 |
| | | | 1.8 | transporters | | | | |
| | | | blastx.2 | probable ABC-type | pir\|S27998\|S27998 | 100% | 1 | 651 |
| | | | | transport protein msbA - | | 86% | 654 | 989 |
| | | | | Escherichia coli | | | | |
| HNHAG26 | 866694 | 53 | HMMER | PFAM: Biotin synthase | PF01792 | 424.2 | 266 | 775 |
| | | | 2.1.1 | | | | | |
| | | | blastx.2 | biotin synthetase (EC | pir\|JC2517\|SYECBB | 82% | 2 | 880 |
| | | | | 2.8.1.-) - Escherichia | | 87% | 90 | 260 |
| | | | | coli | | 86% | 2 | 112 |
| HNHCI32 | 861673 | 54 | HMMER | PFAM: 7 | PF00001 | 133.17 | 195 | 545 |
| | | | 1.8 | transmembrane | | | | |
| | | | | receptor (rhodopsin | | | | |
| | | | | family) | | | | |
| | | | blastx.2 | G protein-coupled | sp\|AAF27279\|AAF27 | 100% | 189 | 551 |
| | | | | receptor 57. | 279 | 100% | 112 | 186 |
| | | | | | | 100% | 56 | 112 |
| HNTBH68 | 851274 | 56 | HMMER | PFAM: PAP2 | PF01569 | 50.6 | 16 | 420 |
| | | | 2.1.1 | superfamily | | | | |
| | | | blastx.2 | CDNA FLJ20300 FIS, | sp\|BAA91072\|BAA9 | 57% | 1 | 540 |
| | | | | CLONE HEP06465. | 1072 | | | |
| HORBO54 | 870674 | 57 | HMMER | PFAM: Zinc-binding | PF00099 | 5.64 | 277 | 300 |
| | | | 1.8 | metalloprotease domain | | | | |
| HPCID78 | 886915 | 58 | HMMER | PFAM: Sulfate | PF00916 | 26.4 | 265 | 381 |
| | | | 2.1.1 | transporter family | | | | |
| | | | blastx.2 | (AF030880) pendrin | gb\|AAC51873.1\| | 40% | 25 | 375 |
| | | | | [Homo sapiens] | | | | |
| HPWCJ63 | 772553 | 60 | HMMER | PFAM: DedA family | PF00597 | 228 | 235 | 717 |
| | | | 2.1.1 | | | | | |
| | | | blastx.2 | (AE000391) orf, | gb\|AAC76130.1\| | 100% | 148 | 807 |
| | | | | hypothetical protein | | | | |
| | | | | [Escherichia coli] | | | | |
| HSDGH48 | 853378 | 65 | HMMER | PFAM: TrkA | PF02080 | 582.3 | 135 | 1061 |
| | | | 2.1.1 | potassium uptake | | | | |
| | | | | protein | | | | |
| | | | blastx.2 | KefC potassium efflux | emb\|CAA40066.1\| | 99% | 3 | 1055 |
| | | | | system [Escherichia | | 100% | 1055 | 1120 |
| | | | | coli] | | | | |
| HSDIW73 | 587311 | 66 | HMMER | PFAM: Sugar (and | PF00083 | 19.71 | 5 | 538 |
| | | | 1.8 | other) transporters | | | | |
| | | | blastx.2 | (AE000506) putative | gb\|AAC77312.1\| | 100% | 8 | 1075 |
| | | | | transport protein, | | | | |
| | | | | cryptic, orf, joins | | | | |
| | | | | former yjiZ and yjjL | | | | |
| | | | | [Escherichia coli] | | | | |
| HSDJX58 | 891067 | 67 | HMMER | PFAM: NADH- | PF00361 | 97.09 | 1128 | 1487 |
| | | | 1.8 | Ubiquinone/plastoquin | | | | |
| | | | | one, various chains | | | | |
| | | | blastx.2 | hypothetical protein | pir\|C65024\|C65024 | 82% | 735 | 1487 |
| | | | | b2484 - Escherichia | | | | |
| | | | | coli (strain K-12) | | | | |
| HSLCF96 | 637670 | 69 | HMMER | PFAM: Sugar (and | PF00083 | 10.78 | 415 | 576 |
| | | | 1.8 | other) transporters | | | | |
| | | | blastx.2 | (AE000352) putative | gb\|AAC75728.1\| | 94% | 415 | 1179 |
| | | | | transport protein | | 100% | 297 | 413 |
| | | | | [Escherichia coli] | | 70% | 1101 | 1211 |
| | | | | | | 20% | 409 | 600 |
| | | | | | | 26% | 1021 | 1179 |
| HSLFF79 | 609838 | 70 | HMMER | PFAM: Glycosyl | PF00953 | 24.5 | 88 | 231 |
| | | | 2.1.1 | transferase | | | | |
| | | | blastx.2 | probable undecaprenyl- | pir\|C65182\|C65182 | 85% | 82 | 741 |
| | | | | phosphate 1 K-12) | | | | |
| HTEGJ74 | 765901 | 71 | HMMER | PFAM: Tudor domain | PF00567 | 38.5 | 6 | 167 |
| | | | 2.1.1 | | | | | |
| HTNBE16 | 667653 | 72 | blastx.2 | alternatively spliced | gb\|AAB49034.1\| | 75% | 157 | 2 |
| | | | | product using exon | | | | |
| | | | | 13A [Homo sapiens] | | | | |
| HTWEP40 | 694287 | 73 | HMMER | PFAM: Zinc finger, | PF00096 | 34.3 | 65 | 133 |
| | | | 2.1.1 | C2H2 type | | | | |
| | | | blastx.2 | (AL031393) | emb\|CAA20564.1\| | 68% | 2 | 145 |
| | | | | dJ733D15.1 (Zinc- | | 66% | 2 | 145 |
| | | | | finger protein) [Homo | | 48% | 2 | 208 |
| | | | | sapiens] | | 64% | 2 | 145 |
| | | | | | | 66% | 2 | 145 |
| | | | | | | 48% | 2 | 208 |
| | | | | | | 45% | 2 | 208 |
| | | | | | | 38% | 130 | 468 |
| | | | | | | 41% | 2 | 208 |
| | | | | | | 31% | 124 | 468 |
| | | | | | | 34% | 175 | 468 |
| | | | | | | 39% | 124 | 291 |
| | | | | | | 32% | 166 | 384 |
| | | | | | | 38% | 130 | 225 |
| HTXGF27 | 695766 | 74 | HMMER | PFAM: short chain | PF00106 | 208.7 | 193 | 765 |
| | | | 2.1.1 | dehydrogenase | | | | |
| | | | blastx.2 | hypothetical protein | pir\|T17307\|T17307 | 93% | 70 | 1011 |
| | | | | DKFZp5660084.1 - | | 100% | 38 | 73 |
| | | | | human | | | | |
| HTXPS22 | 868293 | 75 | HMMER | PFAM: Mitochondrial | PF00153 | 240.27 | 214 | 1104 |
| | | | 1.8 | carrier proteins | | | | |
| | | | blastx.2 | (AF043695) Similar to | gb\|AAB97551.1\| | 41% | 175 | 1179 |
| | | | | mitochondrial carrier | | | | |
| | | | | protein [Caenorhabditis | | | | |
| | | | | elegans] | | | | |
| HUSJT79 | 866511 | 77 | HMMER | PFAM: Mitochondrial | PF00153 | 240.27 | 484 | 1374 |
| | | | 1.8 | carrier proteins | | | | |
| | | | blastx.2 | (AF043695) Similar to | gb\|AAB97551.1\| | 41% | 445 | 1449 |
| | | | | mitochondrial carrier | | | | |
| | | | | protein [Caenorhabditis | | | | |
| | | | | elegans] | | | | |
| HWAGP22 | 909919 | 78 | HMMER | PFAM: FYVE zinc | PF01363 | 89.9 | 516 | 716 |
| | | | 2.1.1 | finger | | | | |
| | | | blastx.2 | (AL031027) | emb\|CAA19842.1\| | 50% | 78 | 710 |
| | | | | /prediction=(method:″″ | | | | |
| | | | | genefinder″″, 111 | | | | |
| | | | | PROTEIN)″″, sp | | | | |
| HWBAO18 | 751125 | 79 | HMMER | PFAM: FAD binding | PF01494 | 25.1 | 313 | 396 |
| | | | 2.1.1 | domain | | | | |
| | | | blastx.2 | CG11685 PROTEIN. | sp\|Q9VH40\|Q9VH40 | 53% | 196 | 396 |

[0086] Table 2 further characterizes certain encoded polypeptides of the invention, by providing the results of comparisons to protein and protein family databases. The first column provides a unique clone identifier, “Clone ID NO:”, corresponding to a cDNA clone disclosed in Table 1A. The second column provides the unique contig identifier, “Contig ID:” which allows correlation with the information in Table 1A. The third column provides the sequence identifier, “SEQ ID NO:”, for the contig polynucleotide sequences. The fourth column provides the analysis method by which the homology/identity disclosed in the Table was determined. The fifth column provides a description of the PFAM/NR hit identified by each analysis. Column six provides the accession number of the PFAM/NR hit disclosed in the fifth column. Column seven, score/percent identity, provides a quality score or the percent identity, of the hit disclosed in column five. Comparisons were made between polypeptides encoded by polynucleotides of the invention and a non-redundant protein database (herein referred to as “NR”), or a database of protein families (herein referred to as “PFAM”), as described below.

[0087] The NR database, which comprises the NBRF PIR database, the NCBI GenPept database, and the SIB SwissProt and TrEMBL databases, was made non-redundant using the computer program nrdb2 (Warren Gish, Washington University in Saint Louis). Each of the polynucleotides shown in Table 1A, column 3 (e.g., SEQ ID NO:X or the ‘Query’ sequence) was used to search against the NR database. The computer program BLASTX was used to compare a 6-frame translation of the Query sequence to the NR database (for information about the BLASTX algorithm please see Altshul et al., J. Mol. Biol. 215:403-410 (1990); and Gish and States, Nat. Genet. 3:266-272 (1993). A description of the sequence that is most similar to the Query sequence (the highest scoring ‘Subject’) is shown in column five of Table 2 and the database accession number for that sequence is provided in column six. The highest scoring ‘Subject’ is reported in Table 2 if (a) the estimated probability that the match occurred by chance alone is less than 1.0e-07, and (b) the match was not to a known repetitive element. BLASTX returns alignments of short polypeptide segments of the Query and Subject sequences which share a high degree of similarity; these segments are known as High-Scoring Segment Pairs or HSPs. Table 2 reports the degree of similarity between the Query and the Subject for each HSP as a percent identity in Column 7. The percent identity is determined by dividing the number of exact matches between the two aligned sequences in the HSP, dividing by the number of Query amino acids in the HSP and multiplying by 100. The polynucleotides of SEQ ID NO:X which encode the polypeptide sequence that generates an HSP are delineated by columns 8 and 9 of Table 2.

[0088] The PFAM database, PFAM version 2.1, (Sonnhammer et al., Nucl. Acids Res., 26:320-322, 1998)) consists of a series of multiple sequence alignments; one alignment for each protein family. Each multiple sequence alignment is converted into a probability model called a Hidden Markov Model, or HMM, that represents the position-specific variation among the sequences that make up the multiple sequence alignment (see, e.g., Durbin et al., Biological sequence analysis: probabilistic models of proteins and nucleic acids, Cambridge University Press, 1998 for the theory of HMMs). The program HMMER version 1.8 (Sean Eddy, Washington University in Saint Louis) was used to compare the predicted protein sequence for each Query sequence (SEQ ID NO:Y in Table 1A) to each of the HMMs derived from PFAM version 2.1. A HMM derived from PFAM version 2.1 was said to be a significant match to a polypeptide of the invention if the score returned by HMMER 1.8 was greater than 0.8 times the HMMER 1.8 score obtained with the most distantly related known member of that protein family. The description of the PFAM family which shares a significant match with a polypeptide of the invention is listed in column 5 of Table 2, and the database accession number of the PFAM hit is provided in column 6. Column 7 provides the score returned by HMMER version 1.8 for the alignment. Columns 8 and 9 delineate the polynucleotides of SEQ ID NO:X which encode the polypeptide sequence which show a significant match to a PFAM protein family.

[0089] As mentioned, columns 8 and 9 in Table 2, “NT From” and “NT To”, delineate the polynucleotides of “SEQ ID NO:X” that encode a polypeptide having a significant match to the PFAM/NR database as disclosed in the fifth column. In one embodiment, the invention provides a protein comprising, or alternatively consisting of, a polypeptide encoded by the polynucleotides of SEQ ID NO:X delineated in columns 8 and 9 of Table 2. Also provided are polynucleotides encoding such proteins, and the complementary strand thereto.

[0090] The nucleotide sequence SEQ ID NO:X and the translated SEQ ID NO:Y are sufficiently accurate and otherwise suitable for a variety of uses well known in the art and described further below. For instance, the nucleotide sequences of SEQ ID NO:X are useful for designing nucleic acid hybridization probes that will detect nucleic acid sequences contained in SEQ ID NO:X or the cDNA contained in Clone ID NO:Z. These probes will also hybridize to nucleic acid molecules in biological samples, thereby enabling immediate applications in chromosome mapping, linkage analysis, tissue identification and/or typing, and a variety of forensic and diagnostic methods of the invention. Similarly, polypeptides identified from SEQ ID NO:Y may be used to generate antibodies which bind specifically to these polypeptides, or fragments thereof, and/or to the polypeptides encoded by the cDNA clones identified in, for example, Table 1A.

[0091] Nevertheless, DNA sequences generated by sequencing reactions can contain sequencing errors. The errors exist as misidentified nucleotides, or as insertions or deletions of nucleotides in the generated DNA sequence. The erroneously inserted or deleted nucleotides cause frame shifts in the reading frames of the predicted amino acid sequence. In these cases, the predicted amino acid sequence diverges from the actual amino acid sequence, even though the generated DNA sequence may be greater than 99.9% identical to the actual DNA sequence (for example, one base insertion or deletion in an open reading frame of over 1000 bases).

[0092] Accordingly, for those applications requiring precision in the nucleotide sequence or the amino acid sequence, the present invention provides not only the generated nucleotide sequence identified as SEQ ID NO:X, and a predicted translated amino acid sequence identified as SEQ ID NO:Y, but also a sample of plasmid DNA containing cDNA Clone ID NO:Z (deposited with the ATCC on Mar. 24, 2000, having the ATCC designation number PTA-1559 and on Oct. 5, 2000, having the ATCC designation numbers PTA 2574 and PTA 2575; and on Jan. 5, 2001, having the ATCC designation numbers PTA-2874, PTA-2875, PTA-2876, and PTA-2877; and/or as set forth, for example, in Table 1A, 6 and 7). The nucleotide sequence of each deposited clone can readily be determined by sequencing the deposited clone in accordance with known methods. Further, techniques known in the art can be used to verify the nucleotide sequences of SEQ ID NO:X.

[0093] The predicted amino acid sequence can then be verified from such deposits. Moreover, the amino acid sequence of the protein encoded by a particular clone can also be directly determined by peptide sequencing or by expressing the protein in a suitable host cell containing the deposited human cDNA, collecting the protein, and determining its sequence.

[0094] RACE Protocol For Recovery of Full-length Genes

[0095] Partial cDNA clones can be made full-length by utilizing the rapid amplification of cDNA ends (RACE) procedure described in Frohman, M. A., et al., Proc. Nat'l. Acad. Sci. USA, 85:8998-9002 (1988). A cDNA clone missing either the 5′ or 3′ end can be reconstructed to include the absent base pairs extending to the translational start or stop codon, respectively. In some cases, cDNAs are missing the start codon of translation, therefor. The following briefly describes a modification of this original 5′ RACE procedure. Poly A+ or total RNA is reverse transcribed with Superscript II (Gibco/BRL) and an antisense or complementary primer specific to the cDNA sequence. The primer is removed from the reaction with a Microcon Concentrator (Amicon). The first-strand cDNA is then tailed with dATP and terminal deoxynucleotide transferase (Gibco/BRL). Thus, an anchor sequence is produced which is needed for PCR amplification. The second strand is synthesized from the dA-tail in PCR buffer, Taq DNA polymerase (Perkin-Elmer Cetus), an oligo-dT primer containing three adjacent restriction sites (XhoI, SalI and ClaI) at the 5′ end and a primer containing just these restriction sites. This double-stranded cDNA is PCR amplified for 40 cycles with the same primers as well as a nested cDNA-specific antisense primer. The PCR products are size-separated on an ethidium bromide-agarose gel and the region of gel containing cDNA products the predicted size of missing protein-coding DNA is removed. cDNA is purified from the agarose with the Magic PCR Prep kit (Promega), restriction digested with XhoI or SalI, and ligated to a plasmid such as pBluescript SKII (Stratagene) at XhoI and EcoRV sites. This DNA is transformed into bacteria and the plasmid clones sequenced to identify the correct protein-coding inserts. Correct 5′ ends are confirmed by comparing this sequence with the putatively identified homologue and overlap with the partial cDNA clone. Similar methods known in the art and/or commercial kits are used to amplify and recover 3′ ends.

[0096] Several quality-controlled kits are commercially available for purchase. Similar reagents and methods to those above are supplied in kit form from Gibco/BRL for both 5′ and 3′ RACE for recovery of full length genes. A second kit is available from Clontech which is a modification of a related technique, SLIC (single-stranded ligation to single-stranded cDNA), developed by Dumas et al., Nucleic Acids Res., 19:5227-32 (1991). The major differences in procedure are that the RNA is alkaline hydrolyzed after reverse transcription and RNA ligase is used to join a restriction site-containing anchor primer to the first-strand cDNA. This obviates the necessity for the dA-tailing reaction which results in a polyT stretch that is difficult to sequence past.

[0097] An alternative to generating 5′ or 3′ cDNA from RNA is to use cDNA library double-stranded DNA. An asymmetric PCR-amplified antisense cDNA strand is synthesized with an antisense cDNA-specific primer and a plasmid-anchored primer. These primers are removed and a symmetric PCR reaction is performed with a nested cDNA-specific antisense primer and the plasmid-anchored primer.

[0098] RNA Ligase Protocol for Generating the 5′ or 3′ End Sequences to Obtain Full Length Genes

[0099] Once a gene of interest is identified, several methods are available for the identification of the 5′ or 3′ portions of the gene which may not be present in the original cDNA plasmid. These methods include, but are not limited to, filter probing, clone enrichment using specific probes and protocols similar and identical to 5′ and 3′ RACE. While the full length gene may be present in the library and can be identified by probing, a useful method for generating the 5′ or 3′ end is to use the existing sequence information from the original cDNA to generate the missing information. A method similar to 5′ RACE is available for generating the missing 5′ end of a desired full-length gene. (This method was published by Fromont-Racine et al., Nucleic Acids Res., 21(7):1683-1684 (1993)). Briefly, a specific RNA oligonucleotide is ligated to the 5′ ends of a population of RNA presumably containing full-length gene RNA transcript and a primer set containing a primer specific to the ligated RNA oligonucleotide and a primer specific to a known sequence of the gene of interest, is used to PCR amplify the 5′ portion of the desired full length gene which may then be sequenced and used to generate the full length gene. This method starts with total RNA isolated from the desired source, poly A RNA may be used but is not a prerequisite for this procedure. The RNA preparation may then be treated with phosphatase if necessary to eliminate 5′ phosphate groups on degraded or damaged RNA which may interfere with the later RNA ligase step. The phosphatase if used is then inactivated and the RNA is treated with tobacco acid pyrophosphatase in order to remove the cap structure present at the 5′ ends of messenger RNAs. This reaction leaves a 5′ phosphate group at the 5′ end of the cap cleaved RNA which can then be ligated to an RNA oligonucleotide using T4 RNA ligase. This modified RNA preparation can then be used as a template for first strand cDNA synthesis using a gene specific oligonucleotide. The first strand synthesis reaction can then be used as a template for PCR amplification of the desired 5′ end using a primer specific to the ligated RNA oligonucleotide and a primer specific to the known sequence of the gene of interest. The resultant product is then sequenced and analyzed to confirm that the 5′ end sequence belongs to the relevant gene.

[0100] The present invention also relates to vectors or plasmids which include such DNA sequences, as well as the use of the DNA sequences. The material deposited with the ATCC (deposited with the ATCC on Mar. 24, 2000, having the ATCC designation number PTA-1559 and on Oct. 5, 2000, having the ATCC designation numbers PTA 2574 and PTA 2575; and on Jan. 5, 2001, having the ATCC designation numbers PTA-2874, PTA-2875, PTA-2876, and PTA-2877; and/or as set forth, for example, in Table 1A, Table 6, or Table 7) is a mixture of cDNA clones derived from a variety of human tissue and cloned in either a plasmid vector or a phage vector, as described, for example, in Table 7. These deposits are referred to as “the deposits” herein. The tissues from which some of the clones were derived are listed in Table 7, and the vector in which the corresponding cDNA is contained is also indicated in Table 7. The deposited material includes cDNA clones corresponding to SEQ ID NO:X described, for example, in Table 1A (Clone ID NO:Z). A clone which is isolatable from the ATCC Deposits by use of a sequence listed as SEQ ID NO:X, may include the entire coding region of a human gene or in other cases such clone may include a substantial portion of the coding region of a human gene. Furthermore, although the sequence listing may in some instances list only a portion of the DNA sequence in a clone included in the ATCC Deposits, it is well within the ability of one skilled in the art to sequence the DNA included in a clone contained in the ATCC Deposits by use of a sequence (or portion thereof) described in, for example Tables 1A or 2 by procedures hereinafter further described, and others apparent to those skilled in the art.

[0101] Also provided in Table 7 is the name of the vector which contains the cDNA clone. Each vector is routinely used in the art. The following additional information is provided for convenience.

[0102] Vectors Lambda Zap (U.S. Pat. Nos. 5,128,256 and 5,286,636), Uni-Zap XR (U.S. Pat. Nos. 5,128, 256 and 5,286,636), Zap Express (U.S. Pat. Nos. 5,128,256 and 5,286,636), pBluescript (pBS) (Short, J. M. et al., Nucleic Acids Res. 16:7583-7600 (1988); Alting-Mees, M. A. and Short, J. M., Nucleic Acids Res. 17:9494 (1989)) and pBK (Alting-Mees, M. A. et al., Strategies 5:58-61 (1992)) are commercially available from Stratagene Cloning Systems, Inc., 11011 N. Torrey Pines Road, La Jolla, Calif., 92037. pBS contains an ampicillin resistance gene and pBK contains a neomycin resistance gene. Phagemid pBS may be excised from the Lambda Zap and Uni-Zap XR vectors, and phagemid pBK may be excised from the Zap Express vector. Both phagemids may be transformed into E. coli strain XL-1 Blue, also available from Stratagene.

[0103] Vectors pSport1, pCMVSport 1.0, pCMVSport 2.0 and pCMVSport 3.0, were obtained from Life Technologies, Inc., P. O. Box 6009, Gaithersburg, Md. 20897. All Sport vectors contain an ampicillin resistance gene and may be transformed into E. coli strain DH10B, also available from Life Technologies. See, for instance, Gruber, C. E., et al., Focus 15:59-(1993). Vector lafmid BA (Bento Soares, Columbia University, New York, N.Y.) contains an ampicillin resistance gene and can be transformed into E. coli strain XL-1 Blue. Vector pCR®2.1, which is available from Invitrogen, 1600 Faraday Avenue, Carlsbad, Calif. 92008, contains an ampicillin resistance gene and may be transformed into E. coli strain DHIOB, available from Life Technologies. See, for instance, Clark, J. M., Nuc. Acids Res. 16:9677-9686 (1988) and Mead, D. et al., Bio/Technology 9: (1991).

[0104] The present invention also relates to the genes corresponding to SEQ ID NO:X, SEQ ID NO:Y, and/or the deposited clone (Clone ID NO:Z). The corresponding gene can be isolated in accordance with known methods using the sequence information disclosed herein. Such methods include preparing probes or primers from the disclosed sequence and identifying or amplifying the corresponding gene from appropriate sources of genomic material.

[0105] Also provided in the present invention are allelic variants, orthologs, and/or species homologs. Procedures known in the art can be used to obtain full-length genes, allelic variants, splice variants, full-length coding portions, orthologs, and/or species homologs of genes corresponding to SEQ ID NO:X or the complement thereof, polypeptides encoded by genes corresponding to SEQ ID NO:X or the complement thereof, and/or the cDNA contained in Clone ID NO:Z, using information from the sequences disclosed herein or the clones deposited with the ATCC. For example, allelic variants and/or species homologs may be isolated and identified by making suitable probes or primers from the sequences provided herein and screening a suitable nucleic acid source for allelic variants and/or the desired homologue.

[0106] The polypeptides of the invention can be prepared in any suitable manner. Such polypeptides include isolated naturally occurring polypeptides, recombinantly produced polypeptides, synthetically produced polypeptides, or polypeptides produced by a combination of these methods. Means for preparing such polypeptides are well understood in the art.

[0107] The polypeptides may be in the form of the secreted protein, including the mature form, or may be a part of a larger protein, such as a fusion protein (see below). It is often advantageous to include an additional amino acid sequence which contains secretory or leader sequences, pro-sequences, sequences which aid in purification, such as multiple histidine residues, or an additional sequence for stability during recombinant production.

[0108] The polypeptides of the present invention are preferably provided in an isolated form, and preferably are substantially purified. A recombinantly produced version of a polypeptide, including the secreted polypeptide, can be substantially purified using techniques described herein or otherwise known in the art, such as, for example, by the one-step method described in Smith and Johnson, Gene 67:31-40 (1988). Polypeptides of the invention also can be purified from natural, synthetic or recombinant sources using techniques described herein or otherwise known in the art, such as, for example, antibodies of the invention raised against the polypeptides of the present invention in methods which are well known in the art.

[0109] The present invention provides a polynucleotide comprising, or alternatively consisting of, the nucleic acid sequence of SEQ ID NO:X, and/or the cDNA sequence contained in Clone ID NO:Z. The present invention also provides a polypeptide comprising, or alternatively, consisting of, the polypeptide sequence of SEQ ID NO:Y, a polypeptide encoded by SEQ ID NO:X or a complement thereof, a polypeptide encoded by the cDNA contained in Clone ID NO:Z, and/or the polypeptide sequence encoded by a nucleotide sequence in SEQ ID NO:B as defined in column 6 of Table 1B. Polynucleotides encoding a polypeptide comprising, or alternatively consisting of the polypeptide sequence of SEQ ID NO:Y, a polypeptide encoded by SEQ ID NO:X, a polypeptide encoded by the cDNA contained in Clone ID NO:Z, and/or a polypeptide sequence encoded by a nucleotide sequence in SEQ ID NO:B as defined in column 6 of Table 1B are also encompassed by the invention. The present invention further encompasses a polynucleotide comprising, or alternatively consisting of, the complement of the nucleic acid sequence of SEQ ID NO:X, a nucleic acid sequence encoding a polypeptide encoded by the complement of the nucleic acid sequence of SEQ ID NO:X, and/or the cDNA contained in Clone ID NO:Z.

[0110] Moreover, representative examples of polynucleotides of the invention comprise, or alternatively consist of, one, two, three, four, five, six, seven, eight, nine, ten, or more of the sequences delineated in Table 1B column 6, or any combination thereof. Additional, representative examples of polynucleotides of the invention comprise, or alternatively consist of, one, two, three, four, five, six, seven, eight, nine, ten, or more of the complementary strand(s) of the sequences delineated in Table 1B column 6, or any combination thereof. In further embodiments, the above-described polynucleotides of the invention comprise, or alternatively consist of, sequences delineated in Table 1B, column 6, and have a nucleic acid sequence which is different from that of the BAC fragment having the sequence disclosed in SEQ ID NO:B (see Table 1B, column 5). In additional embodiments, the above-described polynucleotides of the invention comprise, or alternatively consist of, sequences delineated in Table 1B, column 6, and have a nucleic acid sequence which is different from that published for the BAC clone identified as BAC ID NO:A (see Table 1B, column 4). In additional embodiments, the above-described polynucleotides of the invention comprise, or alternatively consist of, sequences delineated in Table 1B, column 6, and have a nucleic acid sequence which is different from that contained in the BAC clone identified as BAC ID NO:A (see Table 1B, column 4). Polypeptides encoded by these polynucleotides, other polynucleotides that encode these polypeptides, and antibodies that bind these polypeptides are also encompassed by the invention. Additionally, fragments and variants of the above-described polynucleotides and polypeptides are also encompassed by the invention.

[0111] Further, representative examples of polynucleotides of the invention comprise, or alternatively consist of, one, two, three, four, five, six, seven, eight, nine, ten, or more of the sequences delineated in column 6 of Table 1B which correspond to the same Clone ID NO:Z (see Table 1B, column 1), or any combination thereof. Additional, representative examples of polynucleotides of the invention comprise, or alternatively consist of, one, two, three, four, five, six, seven, eight, nine, ten, or more of the complementary strand(s) of the sequences delineated in column 6 of Table 1B which correspond to the same Clone ID NO:Z (see Table 1B, column 1), or any combination thereof. In further embodiments, the above-described polynucleotides of the invention comprise, or alternatively consist of, sequences delineated in column 6 of Table 1B which correspond to the same Clone ID NO:Z (see Table 1B, column 1) and have a nucleic acid sequence which is different from that of the BAC fragment having the sequence disclosed in SEQ ID NO:B (see Table 1B, column 5). In additional embodiments, the above-described polynucleotides of the invention comprise, or alternatively consist of, sequences delineated in column 6 of Table 1B which correspond to the same Clone ID NO:Z (see Table 1B, column 1) and have a nucleic acid sequence which is different from that published for the BAC clone identified as BAC ID NO:A (see Table 1B, column 4). In additional embodiments, the above-described polynucleotides of the invention comprise, or alternatively consist of, sequences delineated in column 6 of Table 1B which correspond to the same Clone ID NO:Z (see Table 1B, column 1) and have a nucleic acid sequence which is different from that contained in the BAC clone identified as BAC ID NO:A (see Table 1B, column 4). Polypeptides encoded by these polynucleotides, other polynucleotides that encode these polypeptides, and antibodies that bind these polypeptides are also encompassed by the invention. Additionally, fragments and variants of the above-described polynucleotides and polypeptides are also encompassed by the invention.

[0112] Further, representative examples of polynucleotides of the invention comprise, or alternatively consist of, one, two, three, four, five, six, seven, eight, nine, ten, or more of the sequences delineated in column 6 of Table 1B which correspond to the same contig sequence identifer SEQ ID NO:X (see Table 1B, column 2), or any combination thereof. Additional, representative examples of polynucleotides of the invention comprise, or alternatively consist of, one, two, three, four, five, six, seven, eight, nine, ten, or more of the complementary strand(s) of the sequences delineated in column 6 of Table 1B which correspond to the same contig sequence identifer SEQ ID NO:X (see Table 1B, column 2), or any combination thereof. In further embodiments, the above-described polynucleotides of the invention comprise, or alternatively consist of, sequences delineated in column 6 of Table 1B which correspond to the same contig sequence identifer SEQ ID NO:X (see Table 1B, column 2) and have a nucleic acid sequence which is different from that of the BAC fragment having the sequence disclosed in SEQ ID NO:B (see Table 1B, column 5). In additional embodiments, the above-described polynucleotides of the invention comprise, or alternatively consist of, sequences delineated in column 6 of Table 1B which correspond to the same contig sequence identifer SEQ ID NO:X (see Table 1B, column 2) and have a nucleic acid sequence which is different from that published for the BAC clone identified as BAC ID NO:A (see Table 1B, column 4). In additional embodiments, the above-described polynucleotides of the invention comprise, or alternatively consist of, sequences delineated in column 6 of Table 1B which correspond to the same contig sequence identifer SEQ ID NO:X (see Table 1B, column 2) and have a nucleic acid sequence which is different from that contained in the BAC clone identified as BAC ID NO:A (See Table 1B, column 4). Polypeptides encoded by these polynucleotides, other polynucleotides that encode these polypeptides, and antibodies that bind these polypeptides are also encompassed by the invention. Additionally, fragments and variants of the above-described polynucleotides and polypeptides are also encompassed by the invention.

[0113] Moreover, representative examples of polynucleotides of the invention comprise, or alternatively consist of, one, two, three, four, five, six, seven, eight, nine, ten, or more of the sequences delineated in the same row of Table 1B column 6, or any combination thereof. Additional, representative examples of polynucleotides of the invention comprise, or alternatively consist of, one, two, three, four, five, six, seven, eight, nine, ten, or more of the complementary strand(s) of the sequences delineated in the same row of Table 1B column 6, or any combination thereof. In preferred embodiments, the polynucleotides of the invention comprise, or alternatively consist of, one, two, three, four, five, six, seven, eight, nine, ten, or more of the complementary strand(s) of the sequences delineated in the same row of Table 1B column 6, wherein sequentially delineated sequences in the table (i.e. corresponding to those exons located closest to each other) are directly contiguous in a 5′ to 3′ orientation. In further embodiments, above-described polynucleotides of the invention comprise, or alternatively consist of, sequences delineated in the same row of Table 1B, column 6, and have a nucleic acid sequence which is different from that of the BAC fragment having the sequence disclosed in SEQ ID NO:B (see Table 1B, column 5). In additional embodiments, the above-described polynucleotides of the invention comprise, or alternatively consist of, sequences delineated in the same row of Table lB, column 6, and have a nucleic acid sequence which is different from that published for the BAC clone identified as BAC ID NO:A (see Table 1B, column 4). In additional embodiments, the above-described polynucleotides of the invention comprise, or alternatively consist of, sequences delineated in the same row of Table 1B, column 6, and have a nucleic acid sequence which is different from that contained in the BAC clone identified as BAC ID NO:A (see Table 1B, column 4). Polypeptides encoded by these polynucleotides, other polynucleotides that encode these polypeptides, and antibodies that bind these polypeptides are also encompassed by the invention.

[0114] In additional specific embodiments, polynucleotides of the invention comprise, or alternatively consist of, one, two, three, four, five, six, seven, eight, nine, ten, or more of the sequences delineated in column 6 of Table 1B, and the polynucleotide sequence of SEQ ID NO:X (e.g., as defined in Table 1B, column 2) or fragments or variants thereof. Polypeptides encoded by these polynucleotides, other polynucleotides that encode these polypeptides, and antibodies that bind these polypeptides are also encompassed by the invention.

[0115] In additional specific embodiments, polynucleotides of the invention comprise, or alternatively consist of, one, two, three, four, five, six, seven, eight, nine, ten, or more of the sequences delineated in column 6 of Table 1B which correspond to the same Clone ID NO:Z (see Table 1B, column 1), and the polynucleotide sequence of SEQ ID NO:X (e.g., as defined in Table 1A or 1B) or fragments or variants thereof. In preferred embodiments, the delineated sequence(s) and polynucleotide sequence of SEQ ID NO:X correspond to the same Clone ID NO:Z. Polypeptides encoded by these polynucleotides, other polynucleotides that encode these polypeptides, and antibodies that bind these polypeptides are also encompassed by the invention.

[0116] In further specific embodiments, polynucleotides of the invention comprise, or alternatively consist of, one, two, three, four, five, six, seven, eight, nine, ten, or more of the sequences delineated in the same row of column 6 of Table 1B, and the polynucleotide sequence of SEQ ID NO:X (e.g., as defined in Table 1A or 1B) or fragments or variants thereof. In preferred embodiments, the delineated sequence(s) and polynucleotide sequence of SEQ ID NO:X correspond to the same row of column 6 of Table 1B. Polypeptides encoded by these polynucleotides, other polynucleotides that encode these polypeptides, and antibodies that bind these polypeptides are also encompassed by the invention.

[0117] In additional specific embodiments, polynucleotides of the invention comprise, or alternatively consist of a polynucleotide sequence in which the 3′ 10 polynucleotides of one of the sequences delineated in column 6 of Table 1B and the 5′ 10 polynucleotides of the sequence of SEQ ID NO:X are directly contiguous. Nucleic acids which hybridize to the complement of these 20 contiguous polynucleotides under stringent hybridization conditions or alternatively, under lower stringency conditions, are also encompassed by the invention. Polypeptides encoded by these polynucleotides and/or nucleic acids, other polynucleotides and/or nucleic acids that encode these polypeptides, and antibodies that bind these polypeptides are also encompassed by the invention. Additionally, fragments and variants of the above-described polynucleotides, nucleic acids, and polypeptides are also encompassed by the invention.

[0118] In additional specific embodiments, polynucleotides of the invention comprise, or alternatively consist of, a polynucleotide sequence in which the 3′ 10 polynucleotides of one of the sequences delineated in column 6 of Table 1B and the 5′ 10 polynucleotides of a fragment or variant of the sequence of SEQ ID NO:X are directly contiguous Nucleic acids which hybridize to the complement of these 20 contiguous polynucleotides under stringent hybridization conditions or alternatively, under lower stringency conditions, are also encompassed by the invention. Polypeptides encoded by these polynucleotides and/or nucleic acids, other polynucleotides and/or nucleic acids encoding these polypeptides, and antibodies that bind these polypeptides are also encompassed by the invention. Additionally, fragments and variants of the above-described polynucleotides, nucleic acids, and polypeptides are also encompassed by the invention.

[0119] In specific embodiments, polynucleotides of the invention comprise, or alternatively consist of, a polynucleotide sequence in which the 3′ 10 polynucleotides of the sequence of SEQ ID NO:X and the 5′ 10 polynucleotides of the sequence of one of the sequences delineated in column 6 of Table 1B are directly contiguous. Nucleic acids which hybridize to the complement of these 20 contiguous polynucleotides under stringent hybridization conditions or alternatively, under lower stringency conditions, are also encompassed by the invention. Polypeptides encoded by these polynucleotides and/or nucleic acids, other polynucleotides and/or nucleic acids encoding these polypeptides, and antibodies that bind these polypeptides are also encompassed by the invention. Additionally, fragments and variants of the above-described polynucleotides, nucleic acids, and polypeptides are also encompassed by the invention.

[0120] In specific embodiments, polynucleotides of the invention comprise, or alternatively consist of, a polynucleotide sequence in which the 3′ 10 polynucleotides of a fragment or variant of the sequence of SEQ ID NO:X and the 5′ 10 polynucleotides of the sequence of one of the sequences delineated in column 6 of Table 1B are directly contiguous. Nucleic acids which hybridize to the complement of these 20 contiguous polynucleotides under stringent hybridization conditions or alternatively, under lower stringency conditions, are also encompassed by the invention. Polypeptides encoded by these polynucleotides and/or nucleic acids, other polynucleotides and/or nucleic acids encoding these polypeptides, and antibodies that bind these polypeptides are also encompassed by the invention. Additionally, fragments and variants of the above-described polynucleotides, nucleic acids, and polypeptides, are also encompassed by the invention.

[0121] In further specific embodiments, polynucleotides of the invention comprise, or alternatively consist of, a polynucleotide sequence in which the 3′ 10 polynucleotides of one of the sequences delineated in column 6 of Table 1B and the 5′ 10 polynucleotides of another sequence in column 6 are directly contiguous. Nucleic acids which hybridize to the complement of these 20 contiguous polynucleotides under stringent hybridization conditions or alternatively, under lower stringency conditions, are also encompassed by the invention. Polypeptides encoded by these polynucleotides and/or nucleic acids, other polynucleotides and/or nucleic acids encoding these polypeptides, and antibodies that bind these polypeptides are also encompassed by the invention. Additionally, fragments and variants of the above-described, polynucleotides, nucleic acids, and polypeptides are also encompassed by the invention.

[0122] In specific embodiments, polynucleotides of the invention comprise, or alternatively consist of, a polynucleotide sequence in which the 3′ 10 polynucleotides of one of the sequences delineated in column 6 of Table 1 B and the 5′ 10 polynucleotides of another sequence in column 6 corresponding to the same Clone ID NO:Z (see Table 1B, column 1) are directly contiguous. Nucleic acids which hybridize to the complement of these 20 lower stringency conditions, are also encompassed by the invention. Polypeptides encoded by these polynucleotides and/or nucleic acids, other polynucleotides and/or nucleic acids encoding these polypeptides, and antibodies that bind these polypeptides are also encompassed by the invention. Additionally, fragments and variants of the above-described polynucleotides, nucleic acids, and polypeptides are also encompassed by the invention.

[0123] In specific embodiments, polynucleotides of the invention comprise, or alternatively consist of, a polynucleotide sequence in which the 3′ 10 polynucleotides of one sequence in column 6 corresponding to the same contig sequence identifer SEQ ID NO:X (see Table 1B, column 2) are directly contiguous. Nucleic acids which hybridize to the complement of these 20 contiguous polynucleotides under stringent hybridization conditions or alternatively, under lower stringency conditions, are also encompassed by the invention. Polypeptides encoded by these polynucleotides and/or nucleic acids, other polynucleotides and/or nucleic acids encoding these polypeptides, and antibodies that bind these polypeptides are also encompassed by the invention. Additionally, fragments and variants of the above-described polynucleotides, nucleic acids, and polypeptides are also encompassed by the invention.

[0124] In specific embodiments, polynucleotides of the invention comprise, or alternatively consist of a polynucleotide sequence in which the 3′ 10 polynucleotides of one of the sequences delineated in column 6 of Table 1B and the 5′ 10 polynucleotides of another sequence in column 6 corresponding to the same row are directly contiguous. In preferred embodiments, the 3′ 10 polynucleotides of one of the sequences delineated in column 6 of Table 1B is directly contiguous with the 5′ 10 polynucleotides of the next sequential exon delineated in Table 1B, column 6. Nucleic acids which hybridize to the complement of these 20 contiguous polynucleotides under stringent hybridization conditions or alternatively, under lower stringency conditions, are also encompassed by the invention. Polypeptides encoded by these polynucleotides and/or nucleic acids, other polynucleotides and/or nucleic acids encoding these polypeptides, and antibodies that bind these polypeptides are also encompassed by the invention. Additionally, fragments and variants of the above-described polynucleotides, nucleic acids, and polypeptides are also encompassed by the invention.

[0125] Many polynucleotide sequences, such as EST sequences, are publicly available and accessible through sequence databases and may have been publicly available prior to conception of the present invention. Preferably, such related polynucleotides are specifically excluded from the scope of the present invention. Accordingly, for each contig sequence (SEQ ID NO:X) listed in the fourth column of Table 1A, preferably excluded are one or more polynucleotides comprising a nucleotide sequence described by the general formula of a-b, where a is any integer between 1 and the final nucleotide minus 15 of SEQ ID NO:X, b is an integer of 15 to the final nucleotide of SEQ ID NO:X, where both a and b correspond to the positions of nucleotide residues shown in SEQ ID NO:X, and where b is greater than or equal to a +14. More specifically, preferably excluded are one or more polynucleotides comprising a nucleotide sequence described by the general formula of a-b, where a and b are integers as defined in columns 4 and 5, respectively, of Table 3. In specific embodiments, the polynucleotides of the invention do not consist of at least one, two, three, four, five, ten, or more of the specific polynucleotide sequences referenced by the Genbank Accession No. as disclosed in column 6 of Table 3 (including for example, published sequence in connection with a particular BAC clone). In further embodiments, preferably excluded from the invention are the specific polynucleotide sequence(s) contained in the clones corresponding to at least one, two, three, four, five, ten, or more of the available material having the accession numbers identified in the sixth column of this Table (including for example, the actual sequence contained in an identified BAC clone). In no way is this listing meant to encompass all of the sequences which may be excluded by the general formula, it is just a representative example. All references available through these accessions are hereby incorporated by reference in their entirety.

TABLE 3

| | SEQ | | | | |
|---|---|---|---|---|---|
| Clone ID | ID | Contig | EST Disclaimer | | |
| NO: Z | NO: X | ID: | Range of a | Range of b | Accession #'s |
| H7TBC95 | 11 | 865922 | 1-692 | 15-706 | |
| HACCH94 | 12 | 847143 | 1-1399 | 15-1413 | AI093369, AW292321, AA972431, N40174, AA746376, AAI30392, AA286750, |
| | | | | | AA287684, R71586, R71568, R71587, H03136, H03946, R71567, AI471079, H97311, |
| | | | | | AA365025, AF039686, AF118670, AR034800, and AF081916. |
| HAIBU93 | 13 | 907830 | 1-2259 | 15-2273 | AA399232, AA214221, AA214177, AA459064, AI217132, AW339584, AA398082, |
| | | | | | AA442330, AW294203, AI917452, AW403072, AI220568, AA458874, AAI93291, |
| | | | | | AW370558, AW370567, AA417244, AI761150, AA906703, C01285, W27419, |
| | | | | | AA810767, AI952624, R15252, T05960, AW105600, N50941, T15642, AA813317, |
| | | | | | AA992859, T35055, H15240, AA340392, AI016379, AI187986, AI798100, AA781802, |
| | | | | | AA379493, H15178, AW370622, AI783874, AA369389, AW370623, AAI94237, |
| | | | | | T25074, AA808556, AI358612, AL041918, AW191003, I64695, AL031602, X70514, |
| | | | | | E01614, and E13364. |
| HAMAC79 | 14 | 872774 | 1-1081 | 15-1095 | AI358042, AI874151, AL039730, AI400725, F37364, AI887268, AL080011, |
| | | | | | AW302924, AW193203, AW088899, AW409775, AI433206, AA807088, AA864562, |
| | | | | | AI355008, AI537677, AI434242, AI345347, AI918554, I189138, AI859464, AI800464, |
| | | | | | AW411235, AL038445, AI251221, AA911767, AW168503, AL046926, AI521386, |
| | | | | | AL119863, AI582483, AI886594, AW022682, AI829990, AI922577, AW089006, |
| | | | | | AA464646, AI954422, AL036638, AI612015, AW161579, AW168031, AI620093, |
| | | | | | AW058233, AI573026, AL120853, AI919593, AI590423, AAI00772, AI539153, |
| | | | | | AI933992, AL042382, AI345224, AAI27565, AL120526, AI917959, AI311892, |
| | | | | | AI697324, AA643261, AI280670, AA603709, AI344928, AI952064, ALO3 8069, |
| | | | | | AA853213, AW021373, AI680498, AI698401, AI580674, AA853539, AI659795, |
| | | | | | AL048871, AI470293, AI570966, AW089932, AI344933, AI554343, AI916419, |
| | | | | | AI677797, AW238730, AI537617, AI494201, AW076127, AI920782, AL119791, |
| | | | | | AL041150, AI335449, AL038076, AW265004, AI927755, AI963040, AI582871, |
| | | | | | W81248, AA761557, AI573093, AW029401, AA420758, AI537837, AL046463, |
| | | | | | AI241819, AI874166, AI340533, AW083804, AL038715, AI955945, AI334445, |
| | | | | | AI336575, AI696969, AW059828, AI073952, AI633477, AW078680, AW004886, |
| | | | | | AW082623, AI312399, AI648502, AW238688, AI802240, AI866127, AI335426, |
| | | | | | AL110306, AI348777, AW410969, AA572758, AI889168, AI671661, AI690663, |
| | | | | | AI929108, AL036772, AI500039, AW162194, AW305233, AI678355, AW074869, |
| | | | | | AI612014, AL037041, AI471361, AI866100, AW160376, AI343059, AI284509, |
| | | | | | AW193134, AI669639, AI866082, AI280661, AA493647, AL042365, AI349933, |
| | | | | | AA420722, AW268261, AI345608, AI285586, AI446124, AI923989, AI348897, |
| | | | | | D50977, AI174591, AL345251, AW020710, AI419650, AW081255, AI689420, |
| | | | | | AW301300, AI348847, AI251830, AI917963, AW193872, R36271, AI344819, |
| | | | | | AI862220, AI648567, AA291456, AW029579, AI434833, AL040241, AW075207, |
| | | | | | AA848053, AI345253, AW020397, AI312152, AI950688, AI343037, AW269097, |
| | | | | | AI345677, AA938383, AI696611, AI446373, AW075084, AW087385, AI523806, |
| | | | | | AW301409, AL047387, AI932458, AI473451, AI340603, AI919345, AI290153, |
| | | | | | AW151714, AW088903, AI364788, AW130863, AW129230, AI830030, AW084097, |
| | | | | | AI307543, AI249877, AI345370, AI932949, AI799234, AI345527, AW021717, |
| | | | | | AI289542, AI348854, AI817430, AI242736, AI699056, AI446092, AI307569, |
| | | | | | AI345471, AI344935, AI805638, AI334820, AI365256, AI366549, AI366992, |
| | | | | | AI636719, AI313320, AW190286, AI336495, AI478123, AI453487, AW085786, |
| | | | | | AW081034, AI539771, AL039086, AI866608, AI472536, AI307520, AL043981, |
| | | | | | AI805688, AI611743, AI340664, AI590686, AL040207, AI368816, AA830821, |
| | | | | | AW191844, AI309431, AI888621, AI348917, L78810, AL035407, AC005091, |
| | | | | | AC006013, AC004686, AC002454, AC004383, AC004878, AL022147, U62317, |
| | | | | | AL137705, AC004837, AC004797, AC007114, AL049594, AC004159, AC005250, |
| | | | | | AC005057, AL035587, AL033521, AC004883, AL031295, AC006222, AC004987, |
| | | | | | AC005488, AC002416, AC007406, AP000030, AL035458, AC007172, AL031984, |
| | | | | | AL137294, Z82206, AP000514, AG005048, AC006039, AC009286, AC006112, |
| | | | | | AF091512, and AP000344. |
| HBCMD49 | 15 | 865314 | 1-605 | 15-619 | T53860. |
| HBXAN27 | 16 | 823467 | 1-585 | 15-599 | |
| HBXCM38 | 17 | 910086 | 1-2160 | 15-2174 | AI752485, AI804792, AI439106, AI971133, AI991958, AI752484, AI432296, |
| | | | | | AI478420, AW082819, AI912373, R89026, AA894797, AI554161, AI752414, H13307, |
| | | | | | AI249165, R61527, N62403, R89727, N47856, AI689339, AI368569, R61583, |
| | | | | | AI984780, AA219502, H44175, AI802627, AI752415, T32963, AW295386, AA985168, |
| | | | | | H06745, R40750, M79099, AA203312, R00511, A91842, A91846, A91844, and |
| | | | | | A91848. |
| HCEEI37 | 18 | 530915 | 1-452 | 15-466 | H11273. |
| HCEPH84 | 19 | 910864 | 1-1677 | 15-1691 | AA663485, AA442393, AAI67722, AI651722, AA056327, AI479964, AAI91589, |
| | | | | | AI194037, W76203, W72966, AAI93004, AA436615, AA019920, AI298004, |
| | | | | | AA206829, AI372800, AA207119, P33105, Z25123, T33292, AI372801, AI221332, |
| | | | | | AA054088, F36674, R51792, AA019932, R49566, P23450, R56064, AI937722, |
| | | | | | P28731, P26963, AI609568, P36659, T77421, AA350199, T51483, P25641, AA058465, |
| | | | | | R38363, AW248425, P25571, F08410, R55818, AAI91072, T47787, R56176, |
| | | | | | AA054025, AAI80848, AA054057, AAI94490, R16315, Z41401, AA058754, T75382, |
| | | | | | AA018176, P01857, F17797, AA166864, AA204736, F10729, AA249839, R36279, |
| | | | | | R55903, AAI93053, AW138074, AA326216, F02117, P13127, AA339074, P05591, |
| | | | | | AAI94690, Z42609, AW247972, F35038, Z63803, Z64258, Z63848, Z61696, Z61697, |
| | | | | | and Z64257. |
| HCWFP47 | 20 | 849893 | 1-398 | 15-412 | |
| HCWTB56 | 21 | 853009 | 1-474 | 15-488 | |
| HDPIT61 | 22 | 741724 | 1-408 | 15-422 | AC004126. |
| HDPMA48 | 23 | 582015 | 1-829 | 15-843 | AI760818, and AI769951. |
| HDPVY34 | 24 | 839178 | 1-1323 | 15-1337 | U66680, AI651024, AW338289, AA099357, T84930, AI476130, AI651541, T92055, |
| | | | | | AAI01906, AI082697, AI695358, AC005495, and AC005922. |
| HDQDY52 | 25 | 852622 | 1-771 | 15-785 | AW015554, AW139739, AA284952, AI478494, AA918422, AL049709, and |
| | | | | | AF216873. |
| HDQHZ22 | 26 | 879416 | 1-396 | 15-410 | |
| HDTBL45 | 27 | 785534 | 1-431 | 15-445 | |
| HDTIF01 | 28 | 883070 | 1-515 | 15-529 | AA938105, R98945, AI110760, AL119762, AL041013, AI114869, AW075511, |
| | | | | | AW102811, AA806796, AA070456, AI13356, AI061646, AA767276, AA524821, |
| | | | | | T74382, AI313166, AA219225, AA224525, AA601348, AI093030, AA083046, |
| | | | | | AA502104, AA531580, AA836811, AA081825, T40308, AW151713, AA601294, |
| | | | | | AW440545, AA846568, AL046586, AW274346, AW161966, AA765736, AL138254, |
| | | | | | AA774222, AW245747, AA468456, AA377927, AA774780, T56253, N70044, R70821, |
| | | | | | AW407632, AI471603, AA806799, AI499134, R80876, AI826263, AA614180, |
| | | | | | AA634889, H46122, D82542, AA664909, AI345654, AI708009, H40936, AA483929, |
| | | | | | AW103758, AI305766, AI284640, AW168453, AAI21894, AL035659, AL121603, |
| | | | | | AC002470, AC004167, AL031846, AL035420, AC005412, AC007021, AC005280, |
| | | | | | AL096774, AC003043, AC006084, AC004738, AC003664, AL031255, AC000052, |
| | | | | | AL035400, AC007731, AL049780, AC005531, AL031767, AC007055, Z83819, |
| | | | | | AC004149, AC002301, AL080243, AC004150, AC00SS00, AP000553, AC002072, |
| | | | | | AC009516, AL034549, AC004263, AL139054, AC004019, AC006285, AC004675, |
| | | | | | AC004859, AL049758, AC005084, AL022721, AL035587, AC00S411, AC005694, |
| | | | | | AP000966, AF088219, AC007216, AL022165, AC004895, AC003108, AC006042, |
| | | | | | AP000555, U80017, AC000026, U85195, AC006241, AL031447, AC004216, Z95118, |
| | | | | | AC009044, AL031577, AC005031, AC005670, AC000087, AC004797, AC004815, |
| | | | | | U72787, AC005911, AC007057, AL022316, AC005089, AC002476, AC005666, |
| | | | | | AC005003, AL022302, AL132712, AE000658, AC002059, AC004765, AC006146, |
| | | | | | AP000133, AP000211, L44140, AL117347, AC020663, AL121652, AC002456, |
| | | | | | AC006530, AC005479, AF067844, AC003101, AC004099, AC005920, AF109907, |
| | | | | | Z81364, AL031680, AC005527, AL022238, AC005104, Z98051, AL049636, |
| | | | | | AF001549, AL009179, AC006441, AC004230, AC012384, AC004820, AL023575, |
| | | | | | AC002565, AC005081, AC003029, AL096712, AC003003, AC007226, AC007240, |
| | | | | | AC003690, AC002465, AC004990, AL121595, AL133371, AC002991, AL049759, |
| | | | | | AB023051, AC006211, AC005562, AG005075, AC005839, AC002310, AC007681, |
| | | | | | AL031685, AP000257, AC005150, U91322, AC007114, AF010238, U47924, |
| | | | | | AC005158, AL020995, AC005516, AF039907, IJ95742, AC005783, AC006026, |
| | | | | | AL133163, AC000025, AC007676, AL080317, Z99716, AC005037, AC005180, |
| | | | | | AC005913, AC005179, AC002067, AC005071, AC005620, AC008079, AC004890, |
| | | | | | AP000210, AP000132, AL049776, Z94721, AC006205, AC002368, AC006538, |
| | | | | | AC006450, AC004835, AC005529, AJ011930, AC004999, AC007537, AL023803, |
| | | | | | AC005353, AC004067, AP000512, AC003950, AL031584, AC004913, Z95114, |
| | | | | | AC007193, AL109865, Z83822, AF172277, AP000098, AC005360, AC007050, |
| | | | | | U95740, AL022476, AL132777, AC007842, AC004878, AL034420, AL008725, |
| | | | | | AP000116, AL121655, AC005015, AC006271, AC004098, AL031681, Z86090, |
| | | | | | AC004970, AF024533, AL008718, AC005154, AC006130, AC008372, AC006126, |
| | | | | | AC007243, AC004686, AC003086, AC006365, Z93017, AL022326, AC007160, |
| | | | | | AL031666, AC004690, AC007685, AL049766, AC005207, AJ246003, AC004525, |
| | | | | | AC004881, AL050318, AC006459, Z82244, AC002070, AC003065, Z93930, |
| | | | | | AC005902, AF121781, AC005829, AC005067, AP000354, AC007151, Z98200, |
| | | | | | AC002546, AC006449, AC006960, AC008417, AL031284, AL022163, AC005815, |
| | | | | | U52112, AL049709, AC004814, AC005776, AC004477, AL023494, AC005701, |
| | | | | | AL049539, and AP000502. |
| HE6AK76 | 29 | 890690 | 1-673 | 15-687 | N30757, AI160702, AI167958, AI188336, AI800736, AI189531, R64705, AI148582, |
| | | | | | AI138230, AI091542, AA297189, C18733, AI459142, R64704, AA706870, R27974, |
| | | | | | C17054, R21799, N56647, R28229, C18923, AI864108, R31571, R24511, AA704958, |
| | | | | | AC006133, AC005205, AC005515, and AF117383. |
| HEGAN70 | 30 | 839719 | 1-891 | 15-905 | AA995279, M78884, and AB023151. |
| HELFN75 | 31 | 658681 | 1-621 | 15-635 | |
| HELGD12 | 32 | 695717 | 1-971 | 15-985 | T03124. |
| HELGW31 | 33 | 610003 | 1-1645 | 15-1659 | C14389, D80268, AW177440, AW177501, AW177511, AW352117, D81026, D59502, |
| | | | | | AI905856, AW178893, T03269, C14014, AA305578, AW179328, AW366296, |
| | | | | | AW360811, AW375405, AA514188, D58283, D59859, D80022, C14331, D80166, |
| | | | | | D80195, D80193, D59927, D59467, D51423, D59619, D80210, D51799, D80391, |
| | | | | | D80164, D59275, D80240, D80253, D80043, D59787, D80227, AW378532, D81030, |
| | | | | | D80212, D80196, D80188, D80219, AW176467, C15076, D80269, D80038, D59610, |
| | | | | | D57483, D80366, AA305409, C14429, D51022, D50979, D50995, D59889, |
| | | | | | AW178762, D80024, AW377671, D80378, AW178775, AW360844, AW360817, |
| | | | | | D80241, D51060, AW352158, AW375406, D80248, AW378534, AW179332, |
| | | | | | AW377672, AW179023, AW178905, D80134, D80045, D80132, D51097, AW352170, |
| | | | | | D58253, AW352171, D80522, AW377676, AW177731, AW178907, AW179019, |
| | | | | | AW179024, D80251, AA514186, C75259, D80133, AW178906, AW177505, |
| | | | | | AW179020, AW178909, AW177456, AW179329, AW178980, AW177733, |
| | | | | | AW378528, AW178908, AW178754, AW179018, AW179004, AW178914, |
| | | | | | AW178911, AW367967, AW352174, D80302, AW178774, AW177723, 080439, |
| | | | | | D80247, T48593, AI535850, AW178983, D51103, AW367950, C14975, AW178986, |
| | | | | | D45260, AI525913, Y17188, X82626, A84916, A67220, 089785, A62300, A62298, |
| | | | | | A78862, D34614, 026022, 088547, AJ132110, AR018138, X67155, A25909, |
| | | | | | AF058696, AR008278, Y12724, AR025207, AB028859, AB012117, A94995, A85396, |
| | | | | | D88507, AR066482, A44171, A85477, AR008443, I19525, A86792, I18367, X93549, |
| | | | | | I50126, I50132, I50128, I50133, AR066488, A82595, AR066490, AR016514, D50010, |
| | | | | | D13509, AR060138, A45456, A26615, AR052274, Y09669, AR060385, AB002449, |
| | | | | | AR066487, A43192, A43190, AR038669, A30438, AR008408, U79457, AF135125, |
| | | | | | AR060133, and AR008382. |
| HETKH30 | 34 | 884009 | 1-925 | 15-939 | AA436699, AA442502, H25167, AA306355, H11845, and AA584520. |
| HFIEC13 | 35 | 883185 | 1-511 | 15-525 | Z59127. |
| HFIHE47 | 36 | 857988 | 1-1959 | 15-1973 | AA534198, AI978627, AW166513, AI459812, AW166498, AI819341, AW195142, |
| | | | | | AI139595, AA209319, AI365580, AI620649, AI022352, AA583627, AW005402, |
| | | | | | AA583619, AI475193, AW166054, AI569467, AI540081, AI191668, AA331346, |
| | | | | | AI272323, R51977, AA508608, AA678590, AA524450, AW451651, AI090886, |
| | | | | | AW082159, F09189, R51978, AA378790, AI382250, AI378098, AI917676, AI868588, |
| | | | | | T46979, AI355097, AI635445, AW131365, F11527, AI291485, N64277, and T46978. |
| HFRBN81 | 37 | 833061 | 1-3012 | 15-3026 | |
| HHFGC14 | 38 | 741650 | 1-358 | 15-372 | |
| HHPDZ65 | 39 | 890894 | 1-437 | 15-451 | AJ242554. |
| HHSAD81 | 40 | 847391 | 1-1768 | 15-1782 | AR045201. |
| HJBBP54 | 41 | 869621 | 1-563 | 15-577 | AA356633, and AL023803. |
| HKAAR71 | 42 | 863023 | 1-963 | 15-977 | AW068487, AW239526, T19084, R73854, AA984561, AAI90644, R22358, R14385, |
| | | | | | AI968382, AA773650, AA425030, AW237628, AJ242972, and AJ242971. |
| HLJDW02 | 43 | 837592 | 1-520 | 15-534 | AI129970, W19120, AW025398, AI924523, AI679000, AA744560, AA769575, |
| | | | | | AW268846, AI763426, AI760722, AI806766, AI221418, AI382062, AA648499, |
| | | | | | AI568939, AI832066, AA279744, AI523866, AA642140, AI218262, AI734145, |
| | | | | | AA486148, AI191525, AA651895, AI732751, AW169990, AI271768, AA486087, |
| | | | | | AW183525, AA828295, AA983960, AI094586, AI147572, D30983, N45144, |
| | | | | | AA203626, AI141016, AA946631, AI808932, AA972068, AA830508, AA865691, |
| | | | | | AI807188, AA648280, AI056559, AI056557, AA804495, AA970454, AF090386, |
| | | | | | AF098484, AF200345, AR016588, AF090387, AF200344, AF098485, A70198, |
| | | | | | A70213, A70212, A70209, A70210, and A70200. |
| HLWDW80 | 44 | 879159 | 1-631 | 15-645 | U43205. |
| HLYGH51 | 45 | 871634 | 1-451 | 15-465 | R07073, and AC009363. |
| HMAIA55 | 46 | 899404 | 1-1005 | 15-1019 | AI380016, AA917719, AI990640, AA380953, and AI002739. |
| HMCDN22 | 47 | 895981 | 1-615 | 15-629 | AW264938, AA039677, AI554747, AI696900, AL042720, AL045791, AL040219, |
| | | | | | AA614566, AA459899, AI697044, AA077186, AI201384, AA040234, AA622885, |
| | | | | | T62577, AI076623, AI247893, AA325208, AA074393, AI858610, AA280172, R10147, |
| | | | | | AA308856, AI267803, AI870586, AL046240, AA757892, AL048960, AA249116, |
| | | | | | AI267805, AA906248, AA077724, AW372467, AA999887, H19634, AI203658, |
| | | | | | AA910849, AA906244, H19636, AI129946, AI949914, AI289213, AI656920, |
| | | | | | AA996066, AW197305, AA078294, AA345106, AL042573, R10553, N22657, |
| | | | | | AAI27979, AC006014, AC005488, AJ007798, AL137492, AC005071, AF030453, and |
| | | | | | AC005088. |
| HMELR71 | 48 | 907836 | 1-2040 | 15-2054 | AW369716, AW175758, AI738985, AA476801, AA419607, W33002, AI935727, |
| | | | | | AI927924, AI935390, AA443750, AA305784, AW363334, AA233217, R69020, |
| | | | | | AAI36791, AA362443, AAI36693, W27603, AA362718, AW298396, T40482, and |
| | | | | | AI432304. |
| HNFCS26 | 49 | 899406 | 1-1687 | 15-1701 | H70763, AW376414, AW403498, AW205281, AW204171, AW450761, AI571894, |
| | | | | | AF114491, AC004262, AC005327, AC004999, AF053356, AC004841, AL021707, |
| | | | | | AC003010, AC004834, AC007151, M22403, AC007663, and AL034400. |
| HNGFK28 | 50 | 544726 | 1-977 | 15-991 | |
| HNGIY79 | 51 | 775229 | 1-518 | 15-532 | AA306200, I109834, and Z99714. |
| HNGMJ89 | 52 | 786340 | 1-566 | 15-580 | |
| HNHAG26 | 53 | 866694 | 1-1430 | 15-1444 | AI526107, AI535772, A38246, E00893, AI1530, AR029499, AR029496, and AI1542. |
| HNHCI32 | 54 | 861673 | 1-586 | 15-600 | AF112462, and AR035954. |
| HNHKN73 | 55 | 762011 | 1-548 | 15-562 | |
| HNTBH68 | 56 | 851274 | 1-569 | 15-583 | AW157233, Z43649, C15376, and R20382. |
| HORBO54 | 57 | 870674 | 1-566 | 15-580 | AW166235. |
| HPCID78 | 58 | 886915 | 1-793 | 15-807 | |
| HPMED52 | 59 | 531347 | 1-438 | 15-452 | AI906494, and AC005004. |
| HPWCJ63 | 60 | 772553 | 1-1407 | 15-1421 | |
| HRABY74 | 61 | 666239 | 1-360 | 15-374 | AA747489. |
| HRADZ48 | 62 | 883281 | 1-553 | 15-567 | |
| HRDFT45 | 63 | 506584 | 1-530 | 15-544 | AC004142. |
| HROAI61 | 64 | 742084 | 1-596 | 15-610 | AI769476, W77827, AW269989, AI339358, AI215593, AA973129, W72191, |
| | | | | | AW450132, N95340, AA247151, and W24962. |
| HSDGH48 | 65 | 853378 | 1-1108 | 15-1122 | |
| HSDIW73 | 66 | 587311 | 1-1528 | 15-1542 | |
| HSDJX58 | 67 | 891067 | 1-1475 | 15-1489 | AA570522. |
| HSKJR15 | 68 | 866396 | 1-394 | 15-408 | AI287342, N49215, and AB020629. |
| HSLCF96 | 69 | 637670 | 1-1575 | 15-1589 | |
| HSLFF79 | 70 | 609838 | 1-898 | 15-912 | |
| HTEGJ74 | 71 | 765901 | 1-474 | 15-488 | R13795, and R14717. |
| HTNBE16 | 72 | 667653 | 1-564 | 15-578 | N59452, N71841, AA384945, AA610644, AA640305, AA262079, AA661583, |
| | | | | | AI299445, AI570067, AA723132, AA730530, AA669238, AA831426, AI268818, |
| | | | | | AA715848, AA639040, AA056619, AI090377, AW275432, F18885, AI457152, |
| | | | | | AI567676, AI363762, AL022149, AC005618, AC004534, Y14768, AP000505, |
| | | | | | AF011889, AC005585, AC007227, Z97632, AL035690, AC006369, AC005529, |
| | | | | | AL031846, AC005690, AC000115, AC005011, AC004913, AC006597, AC004796, |
| | | | | | AL096701, AL022333, AC003665, AL034400, AP000512, AL034421, AC005808, |
| | | | | | AL121603, AC004655, AB001523, AC007371, AC003982, AC007253, AC005209, |
| | | | | | IJ80017, AC004150, AB023051, AP000348, AC007057, AC005900, AC004929, |
| | | | | | AC005632, AL031311, Z93017, AC004477, AC005037, AL035668, AL035405, |
| | | | | | AC002364, AL080243, U95739, AC005031, AG005755, AC000118, AP000557, |
| | | | | | AC004895, AC006539, AP000556, AC004019, AF001550, U85195, AC004106, |
| | | | | | AC005625, AC004835, AC007066, AC005180, Z98946, AE000658, AC005696, |
| | | | | | AC004601, U95740, Z96810, AC007842, AL035423, AC005164, AC005911, |
| | | | | | AC002060, AC005971, AL023574, AC005913, AL022163, AC003007, AL122020, |
| | | | | | AF165926, AC005206, AL049872, AL022336, AC004702, AC005339, AL109758, |
| | | | | | AC007386, AC007993, AL022313, AF134726, AC012099, AL109952, AL022165, |
| | | | | | AC006511, AC005667, AC002357, AC005730, AC005740, AC002429, AC020663, |
| | | | | | AJ003147, AL050321, AL133448, AC000353, AC006026, AL024474, AL024498, |
| | | | | | Z98742, AC005231, AC004686, AC004953, AC006088, AF003529, AC004020, |
| | | | | | AC005839, AC004024, AL034402, AF064861, AC007676, AL121653, AC006480, |
| | | | | | AC003102, AL021578, AC005527, AC008072, AL022721, AC004967, AC005412, |
| | | | | | AL049699, AF176815, AC005722, AC005606, AF015262, AC004659, AP000045, |
| | | | | | AP000113, Z93241, AC004703, AJ229043, AP000466, AL008712, AL021155, |
| | | | | | AC002477, AL035445, AC005015, AL020997, Z49918, Z93244, AF139813, |
| | | | | | AC007226, AP000350, AC004552, and AL031587. |
| HTWEP40 | 73 | 694287 | 1-960 | 15-974 | AW001044, AW338063, AAI66908, AAI67095, AI587261, W17364, AI301516, |
| | | | | | AA427528, AI587270, AI804558, AA279647, AW293827, F18620, F34428, F25517, |
| | | | | | AA279853, N78984, and AI905308. |
| HTXGF27 | 74 | 695766 | 1-1283 | 15-1297 | AI935291, AI565606, AW055263, AA827998, AAI34925, R71442, W73084, W37623, |
| | | | | | AI376157, AW071733, AA760869, AW084636, AW084135, N40260, W37624, |
| | | | | | AA621956, AI261507, AI024926, AA576858, AA782442, AI753564, W73188, |
| | | | | | AA457140, AI362706, AI088401, W37568, N80584, AAI00989, AI870558, |
| | | | | | AA552108, AA464487, AA577315, H99262, N42314, AAI35041, AA099421, |
| | | | | | AA917378, AI955891, AW009052, AI865605, AI811602, W37443, AA506577, |
| | | | | | N28234, AI564918, W00732, H56180, AI784357, W07706, AW407317, AI571677, |
| | | | | | T64405, AI018764, AA297089, R71095, AA297614, F19530, AA628651, H56396, |
| | | | | | AA588512, T64219, AI291707, R39750, AA622681, R36668, AI564962, AA814874, |
| | | | | | AI868306, AW247018, AA082510, C00495, AL117567, and AF151851. |
| HTXPS22 | 75 | 868293 | 1-1606 | 15-1620 | AW362027, AA743427, AA397670, AA292922, AW362007, AA866184, AA599493, |
| | | | | | AI148141, AA291584, AA620646, AW250858, AI203574, AI147398, AA502933, |
| | | | | | AI332702, AA459845, AA502773, AI492012, AA832201, AA483283, AA961803, |
| | | | | | AI819427, AI589738, AA316244, AI611032, AA279805, AI280167, AA448182, |
| | | | | | AW129507, AI342551, AL016017, R60127, AAI33901, AA814840, AW250104, |
| | | | | | AI921866, AA703754, AA423892, AA293639, N26046, AAI33900, T31632, |
| | | | | | AA372221, AA303650, AA811159, AA402228, AAI28049, AA774411, T91111, |
| | | | | | N40412, T35049, AA298379, Z46110, AA428623, AA282854, AW248011, AA283632, |
| | | | | | AI867126, AA371302, R20575, H17174, Z38216, AA279681, AA400373, AA423950, |
| | | | | | AA939190, and AA765943. |
| HUSJN66 | 76 | 886987 | 1-766 | 15-780 | AA426047. |
| HUSJT79 | 77 | 866511 | 1-1904 | 15-1918 | AW362027, AA743427, AA292922, AA866184, AW362007, AA599493, AI148141, |
| | | | | | AA620646, AI203574, AI147398, AA502933, AI332702, AA397670, AW250858, |
| | | | | | AA502773, AI492012, AA483283, AA961803, AA832201, AI819427, AI589738, |
| | | | | | AA316244, AI611032, AA279805, AI280167, AI342551, AA448182, AW129507, |
| | | | | | AA814840, AAI33901, AA291584, AI016017, R60127, AI921866, AA459845, |
| | | | | | N40412, AA423892, AA293639, AA703754, N26046, T31632, AA372221, AA811159, |
| | | | | | AA303650, AAI28049, AA402228, AA774411, T91111, AW250104, T35049, |
| | | | | | AAI33900, AA298379, Z46110, AA428623, AW248011, AA282854, AA283632, |
| | | | | | AI867126, R20575, AA400372, H17174, Z38216, AA279681, AA400373, AA423950, |
| | | | | | AAI26926, AA371302, AA939190, AI811631, AI096771, AI624624, AI363802, |
| | | | | | AI521560, AI355779, AI866458, AA847452, AI950887, AI435253, AW020048, |
| | | | | | AA219283, AA665933, AW150794, AW008353, Z65216, AF013214, I89947, Z82022, |
| | | | | | AF068195, and AC005296. |
| HWAGP22 | 78 | 909919 | 1-1716 | 15-1730 | AA833906, W74482, AI417534, AW275969, AA312211, AA428350, W79080, |
| | | | | | AI123420, AAI22083, F37501, AW051466, AA425800, AA121406, AI909926, |
| | | | | | AI909932, F09029, AI909933, AI922293, AA410631, AW057511, F11368, AA410632, |
| | | | | | AA402585, AA470879, AA402715, AA443121, F05224, AI909928, AI909925, and |
| | | | | | AI909918. |
| HWBAO18 | 79 | 751125 | 1-383 | 15-397 | |

[0126] TABLE 4

| Code | Description | Tissue | Organ | Cell Line | Disease | Vector |
|---|---|---|---|---|---|---|
| AR022 | a_Heart | a_Heart | | | | |
| AR023 | a_Liver | a_Liver | | | | |
| AR024 | a_mammary gland | a_mammary gland | | | | |
| AR025 | a_Prostate | a_Prostate | | | | |
| AR026 | a_small intestine | a_small intestine | | | | |
| AR027 | a_Stomach | a_Stomach | | | | |
| AR028 | Blood B cells | Blood B cells | | | | |
| AR029 | Blood B cells activated | Blood B cells | | | | |
| | | activated | | | | |
| AR030 | Blood B cells resting | Blood B cells | | | | |
| | | resting | | | | |
| AR031 | Blood T cells activated | Blood T cells | | | | |
| | | activated | | | | |
| AR032 | Blood T cells resting | Blood T cells resting | | | | |
| AR033 | brain | brain | | | | |
| AR034 | breast | breast | | | | |
| AR035 | breast cancer | breast cancer | | | | |
| AR036 | Cell Line CAOV3 | Cell Line CAOV3 | | | | |
| AR037 | cell line PA-1 | cell line PA-1 | | | | |
| AR038 | cell line transformed | cell line transformed | | | | |
| AR039 | colon | colon | | | | |
| AR040 | colon (9808co65R) | colon (9808co65R) | | | | |
| AR042 | colon (9809co15) | colon (9809co15) | | | | |
| AR042 | colon cancer | colon cancer | | | | |
| AR043 | colon cancer | colon cancer | | | | |
| | (9808co64R) | (9808co64R) | | | | |
| AR044 | colon cancer 9809co14 | colon cancer | | | | |
| | | 9809co14 | | | | |
| AR045 | corn clone 5 | corn clone 5 | | | | |
| AR046 | corn clone 6 | corn clone 6 | | | | |
| AR047 | corn clone2 | corn clone2 | | | | |
| AR048 | corn clone3 | corn clone3 | | | | |
| AR049 | Corn Clone4 | Corn Clone4 | | | | |
| AR050 | Donor II B Cells 24 hrs | Donor II B Cells | | | | |
| | | 24 hrs | | | | |
| AR051 | Donor II B Cells 72 hrs | Donor II B Cells | | | | |
| | | 72 hrs | | | | |
| AR052 | Donor II B-Cells 24 | Donor II B-Cells 24 | | | | |
| | hrs. | hrs. | | | | |
| AR053 | Donor II B-Cells 72 hrs | Donor II B-Cells | | | | |
| | | 72 hrs | | | | |
| AR054 | Donor II Resting B | Donor II Resting B | | | | |
| | Cells | Cells | | | | |
| AR055 | Heart | Heart | | | | |
| AR056 | Human Lung | Human Lung | | | | |
| | (clonetech) | (clonetech) | | | | |
| AR057 | Human Mammary | Human Mammary | | | | |
| | (clontech) | (clontech) | | | | |
| AR058 | Human Thymus | Human Thymus | | | | |
| | (clonetech) | (clonetech) | | | | |
| AR059 | Jurkat (unstimulated) | Jurkat | | | | |
| | | (unstimulated) | | | | |
| AR060 | Kidney | Kidney | | | | |
| AR061 | Liver | Liver | | | | |
| AR062 | Liver (Clontech) | Liver (Clontech) | | | | |
| AR063 | Lymphocytes chronic | Lymphocytes | | | | |
| | lymphocytic leukaemia | chronic lymphocytic | | | | |
| | | leukaemia | | | | |
| AR064 | Lymphocytes diffuse | Lymphocytes | | | | |
| | large B cell lymphoma | diffuse large B cell | | | | |
| | | lymphoma | | | | |
| AR065 | Lymphocytes follicular | Lymphocytes | | | | |
| | lymphoma | follicular lymphoma | | | | |
| AR066 | normal breast | normal breast | | | | |
| AR067 | Normal Ovarian | Normal Ovarian | | | | |
| | (4004901) | (4004901) | | | | |
| AR068 | Normal Ovary | Normal Ovary | | | | |
| | 9508G045 | 9508G045 | | | | |
| AR069 | Normal Ovary | Normal Ovary | | | | |
| | 9701G208 | 9701G208 | | | | |
| AR070 | Normal Ovary | Normal Ovary | | | | |
| | 9806G005 | 9806G005 | | | | |
| AR071 | Ovarian Cancer | Ovarian Cancer | | | | |
| AR072 | Ovarian Cancer | Ovarian Cancer | | | | |
| | (9702G001) | (9702G001) | | | | |
| AR073 | Ovarian Cancer | Ovarian Cancer | | | | |
| | (9707G029) | (9707G029) | | | | |
| AR074 | Ovarian Cancer | Ovarian Cancer | | | | |
| | (98040011) | (98040011) | | | | |
| AR075 | Ovarian Cancer | Ovarian Cancer | | | | |
| | (9806G019) | (9806G019) | | | | |
| AR076 | Ovarian Cancer | Ovarian Cancer | | | | |
| | (9807G017) | (9807G017) | | | | |
| AR077 | Ovarian Cancer | Ovarian Cancer | | | | |
| | (98090001) | (98090001) | | | | |
| AR078 | ovarian cancer 15799 | ovarian cancer | | | | |
| | | 15799 | | | | |
| AR079 | Ovarian Cancer | Ovarian Cancer | | | | |
| | 17717AID | 17717AID | | | | |
| AR080 | Ovarian Cancer | Ovarian Cancer | | | | |
| | 4004664B1 | 4004664B1 | | | | |
| AR081 | Ovarian Cancer | Ovarian Cancer | | | | |
| | 4005315A1 | 4005315A1 | | | | |
| AR082 | ovarian cancer | ovarian cancer | | | | |
| | 94127303 | 94127303 | | | | |
| AR083 | Ovarian Cancer | Ovarian Cancer | | | | |
| | 96069304 | 96069304 | | | | |
| AR084 | Ovarian Cancer | Ovarian Cancer | | | | |
| | 97070029 | 97070029 | | | | |
| AR085 | Ovarian Cancer | Ovarian Cancer | | | | |
| | 98070045 | 98070045 | | | | |
| AR086 | ovarian cancer | ovarian cancer | | | | |
| | 98090001 | 9809G001 | | | | |
| AR087 | Ovarian Cancer | Ovarian Cancer | | | | |
| | 9905C032RC | 9905C032RC | | | | |
| AR088 | Ovarian cancer 9907 | Ovarian cancer 9907 | | | | |
| | C00 3rd | C00 3rd | | | | |
| AR089 | Prostate | Prostate | | | | |
| AR090 | Prostate (clonetech) | Prostate (clonetech) | | | | |
| AR091 | prostate cancer | prostate cancer | | | | |
| AR092 | prostate cancer #15176 | prostate cancer | | | | |
| | | #15176 | | | | |
| AR093 | prostate cancer #15509 | prostate cancer | | | | |
| | | #15509 | | | | |
| AR094 | prostate cancer #15673 | prostate cancer | | | | |
| | | #15673 | | | | |
| AR095 | Small Intestine | Small Intestine | | | | |
| | (Clontech) | (Clontech) | | | | |
| AR096 | Spleen | Spleen | | | | |
| AR097 | Thymus T cells | Thymus T cells | | | | |
| | activated | activated | | | | |
| AR098 | Thymus T cells resting | Thymus T cells | | | | |
| | | resting | | | | |
| AR099 | Tonsil | Tonsil | | | | |
| AR100 | Tonsil geminal center | Tonsil geminal | | | | |
| | centroblast | center centroblast | | | | |
| AR101 | Tonsil germinal center | Tonsil germinal | | | | |
| | B cell | center B cell | | | | |
| AR102 | Tonsil lymph node | Tonsil lymph node | | | | |
| AR103 | Tonsil memory B cell | Tonsil memory B | | | | |
| | | cell | | | | |
| AR104 | Whole Brain | Whole Brain | | | | |
| AR105 | Xenograft ES-2 | Xenograft ES-2 | | | | |
| AR106 | Xenograft SW626 | Xenograft SW626 | | | | |
| H0002 | Human Adult Heart | Human Adult Heart | Heart | | | Uni-ZAP |
| | | | | | | XR |
| H0004 | Human Adult Spleen | Human Adult | Spleen | | | Uni-ZAP |
| | | Spleen | | | | XR |
| H0008 | Whole 6 Week Old | | | | | Uni-ZAP |
| | Embryo | | | | | XR |
| H0009 | Human Fetal Brain | | | | | Uni-ZAP |
| | | | | | | XR |
| H0012 | Human Fetal Kidney | Human Fetal Kidney | Kidney | | | Uni-ZAP |
| | | | | | | XR |
| H0013 | Human 8 Week Whole | Human 8 Week Old | Embryo | | | Uni-ZAP |
| | Embryo | Embryo | | | | XR |
| H0014 | Human Gall Bladder | Human Gall Bladder | Gall | | | Uni-ZAP |
| | | Bladder | | | | XR |
| H0015 | Human Gall Bladder, | Human Gall Bladder | Gall | | | Uni-ZAP |
| | fraction II | | Bladder | | | XR |
| H0024 | Human Fetal Lung III | Human Fetal Lung | Lung | | | Uni-ZAP |
| | | | | | | XR |
| H0026 | Namalwa Cells | Namalwa B-Cell | | | | Lambda |
| | | Line, EBV | | | | ZAP II |
| | | immortalized | | | | |
| H0027 | Human Ovarian Cancer | | | | disease | Uni-ZAP |
| | | | | | | XR |
| H0028 | Human Old Ovary | Human Old Ovary | Ovary | | | pBluescript |
| H0030 | Human Placenta | | | | | Uni-ZAP |
| | | | | | | XR |
| H0031 | Human Placenta | Human Placenta | Placenta | | | Uni-ZAP |
| | | | | | | XR |
| H0032 | Human Prostate | Human Prostate | Prostate | | | Uni-ZAP |
| | | | | | | XR |
| H0036 | Human Adult Small | Human Adult Small | Small Int. | | | Uni-ZAP |
| | Intestine | Intestine | | | | XR |
| H0038 | Human Testes | Human Testes | Testis | | | Uni-ZAP |
| | | | | | | XR |
| H0040 | Human Testes Tumor | Human Testes | Testis | | disease | Uni-ZAP |
| | | Tumor | | | | XR |
| H0046 | Human Endometrial | Human Endometrial | Uterus | | disease | Uni-ZAP |
| | Tumor | Tumor | | | | XR |
| H0050 | Human Fetal Heart | Human Fetal Heart | Heart | | | Uni-ZAP |
| | | | | | | XR |
| H0051 | Human Hippocampus | Human | Brain | | | Uni-ZAP |
| | | Hippocampus | | | | XR |
| H0052 | Human Cerebellum | Human Cerebellum | Brain | | | Uni-ZAP |
| | | | | | | XR |
| H0056 | Human Umbilical | Human Umbilical | Umbilical | | | Uni-ZAP |
| | Vein, Endo. remake | Vein Endothelial | vein | | | XR |
| | | Cells | | | | |
| H0057 | Human Fetal Spleen | | | | | Uni-ZAP |
| | | | | | | XR |
| H0059 | Human Uterine Cancer | Human Uterine | Uterus | | disease | Lambda |
| | | Cancer | | | | ZAP II |
| H0063 | Human Thymus | Human Thymus | Thymus | | | Uni-ZAP |
| | | | | | | XR |
| H0068 | Human Skin Tumor | Human Skin Tumor | Skin | | disease | Uni-ZAP |
| | | | | | | XR |
| H0069 | Human Activated T- | Activated T-Cells | Blood | Cell Line | | Uni-ZAP |
| | Cells | | | | | XR |
| H0071 | Human Infant Adrenal | Human Infant | Adrenal | | | Uni-ZAP |
| | Gland | Adrenal Gland | gland | | | XR |
| H0075 | Human Activated T- | Activated T-Cells | Blood | Cell Line | | Uni-ZAP |
| | Cells (II) | | | | | XR |
| H0081 | Human Fetal | Human Fetal Skin | Skin | | | Uni-ZAP |
| | Epithelium (Skin) | | | | | XR |
| H0083 | HUMAN JURKAT | Jurkat Cells | | | | Uni-ZAP |
| | MEMBRANE | | | | | XR |
| | BOUND | | | | | |
| | POLYSOMES | | | | | |
| H0086 | Human epithelioid | Epithelioid | Sk Muscle | | disease | Uni-ZAP |
| | sarcoma | Sarcoma, muscle | | | | XR |
| H0087 | Human Thymus | Human Thymus | | | | pBluscript |
| H0090 | Human T-Cell | T-Cell Lymphoma | T-Cell | | disease | Uni-ZAP |
| | Lymphoma | | | | | XR |
| H0100 | Human Whole Six | Human Whole Six | Embryo | | | Uni-ZAP |
| | Week Old Embryo | Week Old Embryo | | | | XR |
| H0107 | Human Infant Adrenal | Human Infant | Adrenal | | | pBluescript |
| | Gland, subtracted | Adrenal Gland | gland | | | |
| H0119 | Human Pediatric | Human Pediatric | Kidney | | | Uni-ZAP |
| | Kidney | Kidney | | | | XR |
| H0122 | Human Adult Skeletal | Human Skeletal | Sk Muscle | | | Uni-ZAP |
| | Muscle | Muscle | | | | XR |
| H0123 | Human Fetal Dura | Human Fetal Dura | Brain | | | Uni-ZAP |
| | Mater | Mater | | | | XR |
| H0124 | Human | Human | Sk Muscle | | disease | Uni-ZAP |
| | Rhabdomyosarcoma | Rhabdomyosarcoma | | | | XR |
| H0132 | LNCAP + 30 nM | LNCAP Cell Line | Prostate | Cell Line | | Uni-ZAP |
| | R1881 | | | | | XR |
| H0134 | Raji Cells, | Cyclohexamide | Blood | Cell Line | | Uni-ZAP |
| | cyclohexamide treated | Treated Cem, Jurkat, | | | | XR |
| | | Raji, and Supt | | | | |
| H0135 | Human Synovial | Human Synovial | Synovium | | | Uni-ZAP |
| | Sarcoma | Sarcoma | | | | XR |
| H0136 | Supt Cells, | Cyclohexamide | Blood | Cell Line | | Uni-ZAP |
| | cyclohexamide treated | Treated Cem, Jurkat, | | | | XR |
| | | Raji, and Supt | | | | |
| H0144 | Nine Week Old Early | 9 Wk Old Early | Embryo | | | Uni-ZAP |
| | Stage Human | Stage Human | | | | XR |
| H0156 | Human Adrenal Gland | Human Adrenal | Adrenal | | disease | Uni-ZAP |
| | Tumor | Gland Tumor | Gland | | | XR |
| H0166 | Human Prostate | Human Prostate | Prostate | | disease | Uni-ZAP |
| | Cancer, Stage B2 | Cancer, stage B2 | | | | XR |
| | fraction | | | | | |
| H0169 | Human Prostate | Human Prostate | Prostate | | disease | Uni-ZAP |
| | Cancer, Stage C | Cancer, stage C | | | | XR |
| | fraction | | | | | |
| H0170 | 12 Week Old Early | Twelve Week Old | Embryo | | | Uni-ZAP |
| | Stage Human | Early Stage Human | | | | XR |
| H0171 | 12 Week Old Early | Twelve Week Old | Embryo | | | Uni-ZAP |
| | Stage Human, II | Early Stage Human | | | | XR |
| H0172 | Human Fetal Brain, | Human Fetal Brain | Brain | | | Lambda |
| | random primed | | | | | ZAP II |
| H0178 | Human Fetal Brain | Human Fetal Brain | Brain | | | Uni-ZAP |
| | | | | | | ZR |
| H0181 | Human Primary Breast | Human Primary | Breast | | disease | Uni-ZAP |
| | Cancer | Breast Cancer | | | | XR |
| H0182 | Human Primary Breast | Human Primary | Blood | Cell Line | | Uni-ZAP |
| | Cancer | Breast Cancer | | | | XR |
| H0191 | Human Activated | Human | Blood | Cell Line | | Uni-ZAP |
| | Macrophage (LPS), | Macrophage/ | | | | XR |
| | thiour | Monocytes | | | | |
| H0194 | Human Cerebellum, | Human Cerebellum | Brain | | | pBluescript |
| | subtracted | | | | | |
| H0196 | Human | Human | Heart | | | Uni-ZAP |
| | Cardiomyopathy, | Cardiomyopathy | | | | XR |
| | subtracted | | | | | |
| H0204 | Human Colon Cancer, | Human Colon | Colon | | | pBluescript |
| | subtracted | Cancer | | | | |
| H0212 | Human Prostate, | Human Prostate | Prostate | | | pBluescript |
| | subtracted | | | | | XR |
| H0213 | Human Pituitary, | Human Pituitary | | | | Uni-ZAP |
| | subtracted | | | | | XR |
| H0214 | Raji cells, | Cyclohexamide | Blood | Cell Line | | pBluescript |
| | cyclohexamide treated, | Treated Cem, Jurkat, | | | | |
| | subtracted | Raji, and Supt | | | | |
| H0216 | Supt cells, | Cyclohexamide | Blood | Cell Line | | pBluescript |
| | cyclohexamide treated, | Treated Cem, Jurkat, | | | | |
| | subtracted | Raji, and Supt | | | | |
| H0222 | Activated T-Cells, 8 | Activated T-Cells | Blood | Cell Line | | Uni-ZAP |
| | hrs, subtracted | | | | | XR |
| H0231 | Human Colon, | Human Colon | | | | pBluescript |
| | subtraction | | | | | |
| H0247 | Human Membrane | Human Membrane | Blood | Cell Line | | Uni-ZAP |
| | Bound Polysomes- | Bound Polysomes | | | | XR |
| | Enzyme Subtraction | | | | | |
| H0250 | Human Activated | Human Monocytes | | | | Uni-ZAP |
| | Monocytes | | | | | XR |
| H0252 | Human Osteosarcoma | Human | Bone | | disease | Uni-ZAP |
| | | Osteosarcoma | | | | XR |
| H0253 | Human adult testis, | Human Adult Testis | Testis | | | Uni-ZAP |
| | large inserts | | | | | XR |
| H0261 | H. cerebellum, Enzyme | Human Cerebellum | Brain | | | Uni-ZAP |
| | subtracted | | | | | XR |
| H0264 | human tonsils | Human Tonsil | Tonsil | | | Uni-ZAP |
| | | | | | | XR |
| H0265 | Activated T-Cell | T-Cells | Blood | Cell Line | | Uni-ZAP |
| | (12 hs)/Thiouridine | | | | | XR |
| | labelledEco | | | | | |
| H0266 | Human Microvascular | HMEC | Vein | Cell Line | | Lambda |
| | Endothelial Cells, fract. | | | | | ZAP II |
| | A | | | | | |
| H0271 | Human Neutrophil, | Human Neutrophil - | Blood | Cell Line | | Uni-ZAP |
| | Activated | Activated | | | | XR |
| H0288 | Human OB HOS | Human | Bone | Cell Line | | Uni-ZAP |
| | control fraction I | Osteoblastoma HOS | | | | XR |
| | | cell line | | | | |
| H0292 | Human OB HOS | Human | Bone | Cell Line | | Uni-ZAP |
| | treated (10 nM E2) | Osteoblastoma HOS | | | | XR |
| | fraction 1 | cell line | | | | |
| H0294 | Amniotic Cells - TNF | Amniotic Cells - | Placenta | Cell Line | | Uni-ZAP |
| | induced | TNF induced | | | | XR |
| H0295 | Amniotic Cells - | Amniotic Cells - | Placenta | Cell Line | | Uni-ZAP |
| | Primary Culture | Primary Culture | | | | XR |
| H0305 | CD34 positive cells | CD34 Positive Cells | Cord | | | ZAP |
| | (Cord Blood) | | Blood | | | Express |
| H0306 | CD34 depleted Buffy | CD34 Depleted | Cord | | | ZAP |
| | Coat (Cord Blood) | Buffy Coat (Cord | Blood | | | Express |
| | | Blood) | | | | |
| H0309 | Human Chronic | Synovium, Chronic | Synovium | | disease | Uni-ZAP |
| | Synovitis | Synovitis/ | | | | XR |
| | | Osteoarthritis | | | | |
| H0316 | HUMAN STOMACH | Human Stomach | Stomach | | | Uni-ZAP |
| | | | | | | XR |
| H0318 | HUMAN B CELL | Human B Cell | Lymph | | disease | Uni-ZAP |
| | LYMPHOMA | Lymphoma | Node | | | XR |
| H0320 | Human frontal cortex | Human Frontal | Brain | | | Uni-ZAP |
| | | Cortex | | | | XR |
| H0327 | human corpus colosum | Human Corpus | Brain | | | Uni-ZAP |
| | | Callosum | | | | XR |
| H0328 | human ovarian cancer | Ovarian Cancer | Ovary | | disease | Uni-ZAP |
| | | | | | | XR |
| H0333 | Hemangiopericytoma | Hemangiopericytom | Blood | | disease | Lambda |
| | | a | vessel | | | ZAP II |
| H0341 | Bone Marrow Cell | Bone Marrow Cell | Bone | Cell Line | | Uni-ZAP |
| | Line (RS4;11) | Line R54;11 | Marrow | | | XR |
| H0345 | SKIN | Skin - 4000868H | Skin | | | Uni-ZAP |
| | | | | | | XR |
| H0351 | Glioblastoma | Glioblastoma | Brain | | disease | Uni-ZAP |
| | | | | | | XR |
| H0352 | wilm″s tumor | Wilm″s Tumor | | | disease | Uni-ZAP |
| | | | | | | XR |
| H0354 | Human Leukocytes | Human Leukocytes | Blood | Cell Line | | pCMVSport |
| H0355 | Human Liver | Human Liver, | | | | pCMVSport |
| | | normal Adult | | | | 1 |
| H0356 | Human Kidney | Human Kidney | Kidney | | | pCMV Sport |
| | | | | | | 1 |
| H0366 | L428 cell line | L428 | | | | ZAP |
| | | | | | | Express |
| H0369 | H. Atrophic | Atrophic | | | | Uni-ZAP |
| | Endometrium | Endometrium and | | | | XR |
| | | myometrium | | | | |
| H0370 | H. Lymph node breast | Lymph node with | | | disease | Uni-ZAP |
| | Cancer | Met. Breast Cancer | | | | XR |
| H0375 | Human Lung | Human Lung | | | | pCMVSport |
| | | | | | | 1 |
| H0392 | H. Meningima, Ml | Human Meningima | brain | | | pSport1 |
| H0393 | Fetal Liver, subtraction | Human Fetal Liver | Liver | | | pBluescript |
| | II | | | | | |
| H0403 | H. Umbilical Vein | HUVE Cells | Umbilical | Cell Line | | Uni-ZAP |
| | Endothelial Cells, IL4 | | vein | | | XR |
| | induced | | | | | |
| H0411 | H Female Bladder, | Human Female | Bladder | | | pSport1 |
| | Adult | Adult Bladder | | | | |
| H0412 | Human umbilical vein | HUVE Cells | Umbilical | Cell Line | | pSport1 |
| | endothelial cells, IL-4 | | vein | | | |
| | induced | | | | | |
| H0413 | Human Umbilical Vein | HUVE Cells | Umbilical | Cell Line | | pSport1 |
| | Endothelial Cells, | | vein | | | |
| | uninduced | | | | | |
| H0415 | H. Ovarian Tumor, II, | Ovarian Tumor, | Ovary | | disease | pCMVSport |
| | OV5232 | OV5232 | | | | 2.0 |
| H0416 | Human Neutrophils, | Human Neutrophil - | Blood | Cell Line | | pBluescript |
| | Activated, re-excision | Activated | | | | |
| H0421 | Human Bone Marrow, | Bone Marrow | | | | pBluescript |
| | re-excision | | | | | |
| H0422 | T-Cell PHA 16 hrs | T-Cells | Blood | Cell Line | | pSport1 |
| H0423 | T-Cell PHA 24 hrs | T-Cells | Blood | Cell Line | | pSport1 |
| H0424 | Human Pituitary, subt | Human Pituitary | | | | pBluescript |
| | IX | | | | | |
| H0427 | Human Adipose | Human Adipose, left | | | | pSport1 |
| | | hiplipoma | | | | |
| H0431 | H. Kidney Medulla, re- | Kidney medulla | Kidney | | | pBluescript |
| | excision | | | | | |
| H0434 | Human Brain, striatum, | Human Brain, | | | | pBluescript |
| | re-excision | Striatum | | | | |
| H0435 | Ovarian Tumor 10-3- | Ovarian Tumor, | Ovary | | | pCMVSport |
| | 95 | OV350721 | | | | 2.0 |
| H0436 | Resting T-Cell | T-Cells | Blood | Cell Line | | pSport1 |
| | Library, II | | | | | |
| H0438 | H. Whole Brain #2, re- | Human Whole Brain | | | | ZAP |
| | excision | #2 | | | | Express |
| H0441 | H. Kidney Cortex, | Kidney cortex | Kidney | | | pBluescript |
| | subtracted | | | | | |
| H0445 | Spleen, Chronic | Human Spleen, CLL | Spleen | | disease | pSport1 |
| | lymphocytic leukemia | | | | | |
| H0448 | Salivary gland, | Human Salivary | Salivary | | | Lambda |
| | subtracted | Gland | gland | | | ZAP II |
| H0455 | H. Striatum | Human Brain, | Brain | | | pBluescript |
| | Depression, subt | Striatum Depression | | | | |
| H0457 | Human Eosinophils | Human Eosinophils | | | | pSport1 |
| H0478 | Salivary Gland, Lib 2 | Human Salivary | Salivary | | | pSport1 |
| | | Gland | glasn | | | |
| H0484 | Breast Cancer Cell | Breast Cancer Cell | | | | pSport1 |
| | line, angiogenic | line, Angiogenic, | | | | |
| | | 36T3 | | | | |
| H0485 | Hodgkin″s Lymphoma | Hodgkin″s | | | disease | pCMVSport |
| | I | Lymphoma I | | | | 2.0 |
| H0486 | Hodgkin″s Lymphoma | Hodgkin″s | | | disease | pCMVSport |
| | II | Lymphoma II | | | | 2.0 |
| H0488 | Human Tonsils, Lib 2 | Human Tonsils | | | | pCMV Sport |
| | | | | | | 2.0 |
| H0494 | Keratinocyte | Keratinocyte | | | | pCMV Sport |
| | | | | | | 2.0 |
| H0497 | HEL cell line | HEL cell line | | HEL | | pSport1 |
| | | | | 92.1.7 | | |
| H0505 | Human Astrocyte | Human Astrocyte | | | | pSport1 |
| H0509 | Liver, Hepatoma | Human Liver, | Liver | | disease | pCMV Sport |
| | | Hepatoma, patient 8 | | | | 3.0 |
| H0510 | Human Liver, normal | Human Liver, | Liver | | | pCMV Sport |
| | | normal, Patient #8 | | | | 3.0 |
| H0518 | pBMC stimulated w/ | pBMC stimulated | | | | pCMV Sport |
| | poly I/C | with poly I/C | | | | 3.0 |
| H0519 | NTERA2, control | NTERA2, | | | | pCMVSport |
| | | Teratocarcinoma | | | | 3.0 |
| | | cell line | | | | |
| H0520 | NTERA2 + retinoic | NTERA2, | | | | pSport1 |
| | acid, 14 days | Teratocarcinoma | | | | |
| | | cell line | | | | |
| H0521 | Primary Dendritic | Primary Dendritic | | | | pCMVSport |
| | Cells, lib 1 | cells | | | | 3.0 |
| H0522 | Primary Dendritic | Primary Dendritic | | | | pCMVSport |
| | cells, frac 2 | cells | | | | 3.0 |
| H0529 | Myoloid Progenitor | TF-1 Cell Line; | | | | pCMV Sport |
| | Cell Line | Myoloid progenitor | | | | 3.0 |
| | | cell line | | | | |
| H0530 | Human Dermal | Human Dermal | | | | pSport1 |
| | Endothelial | Endothelial Cells; | | | | |
| | Cells, untreated | untreated | | | | |
| H0538 | Merkel Cells | Merkel cells | Lymph | | | pSport1 |
| | | | node | | | |
| H0539 | Pancreas Islet Cell | Pancreas Islet Cell | Pancreas | | disease | pSport1 |
| | Tumor | Tumour | | | | |
| H0542 | T Cell helper I | Helper T cell | | | | pCMV Sport |
| | | | | | | 3.0 |
| H0543 | T cell helper II | Helper T cell | | | | pCMV Sport |
| | | | | | | 3.0 |
| H0544 | Human endometrial | Human endometrial | | | | pCMVSport |
| | stromal cells | stromal cells | | | | 3.0 |
| H0545 | Human endometrial | Human endometrial | | | | pCMVSport |
| | stromal cells-treated | stromal cells-treated | | | | 3.0 |
| | with progesterone | with proge | | | | |
| H0546 | Human endometrial | Human endometrial | | | | pCMVSport |
| | stromal cells-treated | stromal cells-treated | | | | 3.0 |
| | with estradiol | with estra | | | | |
| H0547 | NTERA2 | NTERA2, | | | | pSport1 |
| | teratocarcinoma cell | Teratocarcinoma | | | | |
| | line + retinoic acid (14 | cell line | | | | |
| | days) | | | | | |
| H0549 | H. Epididiymus, caput | Human | | | | Uni-ZAP |
| | & corpus | Epididiymus, caput | | | | XR |
| | | and corpus | | | | |
| H0550 | H. Epididiymus, cauda | Human | | | | Uni-ZAP |
| | | Epididiymus, cauda | | | | XR |
| H0552 | Signal trap,Femur | Femur Bone | | | | Other |
| | Bone Marrow, pooled | marrow, pooled | | | | |
| | | from 8 male/female | | | | |
| H0553 | Human Placenta | Human Placenta | | | | pCMVSport |
| | | | | | | 3.0 |
| H0555 | Rejected Kidney, lib 4 | Human Rejected | Kidney | | disease | pCMVSport |
| | | Kidney | | | | 3.0 |
| H0556 | Activated T- | T-Cells | Blood | Cell Line | | Uni-ZAP |
| | cell(12 h)/Thiouridine- | | | | | XR |
| | re-excision | | | | | |
| H0559 | HL-60, PMA 4H, re- | HL-60 Cells, PMA | Blood | Cell Line | | Uni-ZAP |
| | excision | stimulated 4H | | | | XR |
| H0561 | L428 | L428 | | | | pCMVSport |
| | | | | | | 3.0 |
| H0566 | Human Fetal | Human Fetal Brain | | | | pCMVSport |
| | Brain, normalized c50F | | | | | 2.0 |
| H0574 | Hepatocellular Tumor; | Hepatocellular | Liver | | disease | Lambda |
| | re-excision | Tumor | | | | ZAP II |
| H0575 | Human Adult | Human Adult | Lung | | | Uni-ZAP |
| | Pulmonary; re-excision | Pulmonary | | | | XR |
| H0580 | Dendritic cells, pooled | Pooled dendritic | | | | pCMVSport |
| | | cells | | | | 3.0 |
| H0581 | Human Bone Marrow, | Human Bone | Bone | | | pCMV Sport |
| | treated | Marrow | Marrow | | | 3.0 |
| H0583 | B Cell lymphoma | B Cell Lymphoma | B Cell | | disease | pCMVSport |
| | | | | | | 3.0 |
| H0586 | Healing groin wound, | healing groin | groin | | disease | pCMVSport |
| | 6.5 hours post incision | wound, 6.5 hours | | | | 3.0 |
| | | post incision - 2/ | | | | |
| H0587 | Healing groin wound; | Groin-2/19/97 | groin | | disease | pCMVSport |
| | 7.5 hours post incision | | | | | 3.0 |
| H0589 | CD34 positive cells | CD34 Positive Cells | Cord | | | ZAP |
| | (cord blood), re-ex | | Blood | | | Express |
| H0590 | Human adult small | Human Adult Small | Small Int. | | | Uni-ZAP |
| | intestine, re-excision | Intestine | | | | XR |
| H0591 | Human T-cell | T-Cell Lymphoma | T-Cell | | disease | Uni-ZAP |
| | lymphoma; re-excision | | | | | XR |
| H0593 | Olfactory | Olfactory epithelium | | | | pCMVSport |
| | epithelium; nasal cavity | from roof of left | | | | 3.0 |
| | | nasal cacit | | | | |
| H0597 | Human Colon; re- | Human Colon | | | | Lambda |
| | excision | | | | | ZAP II |
| H0598 | Human Stomach; re- | Human Stomach | Stomach | | | Uni-ZAP |
| | excision | | | | | XR |
| H0599 | Human Adult Heart; re- | Human Adult Heart | Heart | | | Uni-ZAP |
| | excision | | | | | XR |
| H0606 | Human Primary Breast | Human Primary | Breast | | disease | Uni-ZAP |
| | Cancer; re-excision | Breast Cancer | | | | XR |
| H0607 | H. Leukocytes, | H. Leukocytes | | | | pCMVSport |
| | normalized cot 50A3 | | | | | |
| H0615 | Human Ovarian Cancer | Ovarian Cancer | Ovary | | disease | Uni-ZAP |
| | Reexcision | | | | | XR |
| H0616 | Human Testes, | Human Testes | Testis | | | Uni-ZAP |
| | Reexcision | | | | | XR |
| H0617 | Human Primary Breast | Human Primary | Breast | | disease | Uni-ZAP |
| | Cancer Reexcision | Breast Cancer | | | | XR |
| H0618 | Human Adult Testes, | Human Adult Testis | Testis | | | Uni-ZAP |
| | Large Inserts, | | | | | XR |
| | Reexcision | | | | | |
| H0619 | Fetal Heart | Human Fetal Heart | Heart | | | Uni-ZAP |
| | | | | | | XR |
| H0620 | Human Fetal Kidney; | Human Fetal Kidney | Kidney | | | Uni-ZAP |
| | Reexcision | | | | | XR |
| H0623 | Human Umbilical | Human Umbilical | Umbilical | | | Uni-ZAP |
| | Vein; Reexcision | Vein Endothelial | vein | | | XR |
| | | Cells | | | | |
| H0624 | 12 Week Early Stage | Twelve Week Old | Embryo | | | Uni-ZAP |
| | Human II; Reexcision | Early Stage Human | | | | XR |
| H0626 | Saos2 Cells; Untreated | Saos2 Cell Line; | | | | pSport1 |
| | | Untreated | | | | |
| H0628 | Human Pre- | Human Pre- | | | | Uni-ZAP |
| | Differentiated | Differentiated | | | | XR |
| | Adipocytes | Adipocytes | | | | |
| H0632 | Hepatocellular | Hepatocellular | Liver | | | Lambda |
| | Tumor; re-excision | Tumor | | | | ZAP II |
| H0634 | Human Testes Tumor, | Human Testes | Testis | | disease | Uni-ZAP |
| | re-excision | Tumor | | | | XR |
| H0635 | Human Activated T- | Activated T-Cells | Blood | Cell Line | | Uni-ZAP |
| | Cells, re-excision | | | | | XR |
| H0638 | CD40 activated | CD40 activated | | | | pSport1 |
| | monocyte dendridic | monocyte dendridic | | | | |
| | cells | cells | | | | |
| H0641 | LPS activated derived | LPS activated | | | | pSport1 |
| | dendritic cells | monocyte derived | | | | |
| | | dendritic cells | | | | |
| H0642 | Hep G2 Cells, lambda | Hep G2 Cells | | | | Other |
| | library | | | | | |
| H0644 | Human Placenta (re- | Human Placenta | Placenta | | | Uni-ZAP |
| | excision) | | | | | XR |
| H0646 | Lung, Cancer | Metastatic | | | | pSport1 |
| | (4005313 A3): | squamous cell lung | | | | |
| | Invasive Poorly | carcinoma, poorly di | | | | |
| | Differentiated Lung | | | | | |
| | Adenocarcinoma, | | | | | |
| H0647 | Lung, Cancer | Invasive poorly | | | disease | pSport1 |
| | (4005163 B7): | differentiated lung | | | | |
| | Invasive, Poorly Diff. | adenocarcinoma | | | | |
| | Adenocarcinoma, | | | | | |
| | Metastatic | | | | | |
| H0650 | B-Cells | B-Cells | | | | pCMVSport |
| | | | | | | 3.0 |
| H0653 | Stromal Cells | Stromal Cells | | | | pSport1 |
| H0656 | B-cells (unstimulated) | B-cells | | | | pSport1 |
| | | (unstimulated) | | | | |
| H0657 | B-cells (stimulated) | B-cells (stimulated) | | | | pSport1 |
| H0658 | Ovary, Cancer | 9809C332- Poorly | Ovary & | | disease | pSport1 |
| | (9809C332): Poorly | differentiate | Fallopian | | | |
| | differentiated | | Tubes | | | |
| | adenocarcinoma | | | | | |
| H0659 | Ovary, Cancer | Grade II Papillary | Ovary | | disease | pSport1 |
| | (15395A1F): Grade II | Carcinoma, Ovary | | | | |
| | Papillary Carcinoma | | | | | |
| H0660 | Ovary, Cancer: | Poorly differentiated | | | disease | pSport1 |
| | (15799A1F) Poorly | carcinoma, ovary | | | | |
| | differentiated | | | | | |
| | carcinoma | | | | | |
| H0661 | Breast, Cancer: | Breast cancer | | | disease | pSport1 |
| | (4004943 A5) | | | | | |
| H0663 | Breast, Cancer: | Breast Cancer - | Breast | | disease | pSport1 |
| | (4005522 A2) | #4005522(A2) | | | | |
| H0664 | Breast, Cancer: | Breast Cancer | Breast | | disease | pSport1 |
| | (9806C012R) | | | | | |
| H0665 | Stromal cells 3.88 | Stromal cells 3.88 | | | | pSport1 |
| H0670 | Ovary, | Ovarian Cancer - | | | | pSport1 |
| | Cancer (4004650 A3): | 4004650A3 | | | | |
| | Well-Differentiated | | | | | |
| | Micropapillary Serous | | | | | |
| | Carcinoma | | | | | |
| H0673 | Human Prostate | Human Prostate | Prostate | | | Uni-ZAP |
| | Cancer, Stage B2; re- | Cancer, stage B2 | | | | XR |
| | excision | | | | | |
| H0674 | Human Prostate | Human Prostate | Prostate | | | Uni-ZAP |
| | Cancer, Stage C; re- | Cancer, stage C | | | | XR |
| | excission | | | | | |
| H0677 | TNFR degenerate | B-Cells | | | | PCRII |
| | oligo | | | | | |
| H0682 | Serous Papillary | serous papillary | | | | pCMVSport |
| | Adenocarcinoma | adenocarcinoma | | | | 3.0 |
| | | (9606G304SPA3B) | | | | |
| H0684 | Serous Papillary | Ovarian Cancer- | Ovaries | | | pCMVSport |
| | Adenocarcinoma | 9810G606 | | | | 3.0 |
| H0687 | Human normal | Human normal | Ovary | | | pCMVSport |
| | ovary (#9610G215) | ovary(#9610G215) | | | | 3.0 |
| H0689 | Ovarian Cancer | Ovarian Cancer, | | | | pCMV Sport |
| | | #9806G019 | | | | 3.0 |
| H0690 | Ovarian Cancer, # | Ovarian Cancer, | | | | pCMV Sport |
| | 9702G001 | #9702G001 | | | | 3.0 |
| H0693 | Normal Prostate | Normal Prostate | | | | pCMVSport |
| | #ODQ3958EN | Tissue # | | | | 3.0 |
| | | ODQ3958EN | | | | |
| S0001 | Brain frontal cortex | Brain frontal cortex | Brain | | | Lambda |
| | | | | | | ZAP II |
| S0002 | Monocyte activated | Monocyte-activated | blood | Cell Line | | Uni-ZAP |
| | | | | | | XR |
| S0003 | Human Osteoclastoma | Osteoclastoma | bone | | disease | Uni-ZAP |
| | | | | | | XR |
| S0007 | Early Stage Human | Human Fetal Brain | | | | Uni-ZAP |
| | Brain | | | | | XR |
| S0010 | Human Amygdala | Amygdala | | | | Uni-ZAP |
| | | | | | | XR |
| S0022 | Human Osteoclastoma | Osteoclastoma | | | | Uni-ZAP |
| | Stromal Cells - | Stromal Cells | | | | XR |
| | unamplified | | | | | |
| S0027 | Smooth muscle, serum | Smooth muscle | Pulmanary | Cell Line | | Uni-ZAP |
| | treated | | artery | | | XR |
| S0028 | Smooth muscle, control | Smooth muscle | Pulmanary | Cell Line | | Uni-ZAP |
| | | | artery | | | XR |
| S0031 | Spinal cord | Spinal cord | spinal | | | Uni-ZAP |
| | | | cord | | | XR |
| S0036 | Human Substantia | Human Substantia | | | | Uni-ZAP |
| | Nigra | Nigra | | | | XR |
| S0038 | Human Whole Brain | Human Whole Brain | | | | ZAP |
| | #2-Oligo dT > 1.5 Kb | #2 | | | | Express |
| S0040 | Adipocytes | Human Adipocytes | | | | Uni-ZAP |
| | | from Osteoclastoma | | | | XR |
| S0044 | Prostate BPH | prostate BPH | Prostate | | disease | Uni-ZAP |
| | | | | | | XR |
| S0045 | Endothelial cells- | Endothelial cell | endothelial | Cell Line | | Uni-ZAP |
| | control | | cell-lung | | | XR |
| S0046 | Endothelial-induced | Endothelial cell | endothelial | Cell Line | | Uni-ZAP |
| | | | cell-lung | | | XR |
| S0049 | Human Brain, Striatum | Human Brain, | | | | Uni-ZAP |
| | | Striatum | | | | XR |
| S0050 | Human Frontal Cortex, | Human Frontal | | | disease | Uni-ZAP |
| | Schizophrenia | Cortex, | | | | XR |
| | | Schizophrenia | | | | |
| S0051 | Human | Human | | | disease | Uni-ZAP |
| | Hypothalmus, | Hypothalamus, | | | | XR |
| | Schizophrenia | Schizophrenia | | | | |
| S0052 | neutrophils control | human neutrophils | blood | Cell Line | | Uni-ZAP |
| | | | | | | XR |
| S0053 | Neutrophils IL-1 and | human neutrophil | blood | Cell Line | | Uni-ZAP |
| | LPS induced | induced | | | | XR |
| S0116 | Bone marrow | Bone marrow | Bone | | | Uni-ZAP |
| | | | marrow | | | XR |
| S0126 | Osteoblasts | Osteoblasts | Knee | Cell Line | | Uni-ZAP |
| | | | | | | XR |
| S0132 | Epithelial-TNFa and | Airway Epithelial | | | | Uni-ZAP |
| | INF induced | | | | | XR |
| S0134 | Apoptotic T-cell | apoptotic cells | | Cell Line | | Uni-ZAP |
| | | | | | | XR |
| S0142 | Macrophage-oxLDL | macrophage- | blood | Cell Line | | Uni-ZAP |
| | | oxidized LDL | | | | XR |
| | | treated | | | | |
| S0150 | LNCAP prostate cell | LNCAP Cell Line | Prostate | Cell Line | | Uni-ZAP |
| | line | | | | | XR |
| S0152 | PC3 Prostate cell line | PC3 prostate cell | | | | Uni-ZAP |
| | | line | | | | XR |
| S0192 | Synovial Fibroblasts | Synovial Fibroblasts | | | | pSport1 |
| | (control) | | | | | |
| S0194 | Synovial hypoxia | Synovial Fibroblasts | | | | pSport1 |
| S0198 | 7TM-pbfd | PBLS, 7TM | | | | PCRII |
| | | receptor enriched | | | | |
| S0206 | Smooth Muscle- | Smooth muscle | Pulmanary | Cell Line | | pBluescript |
| | HASTE normalized | | artery | | | |
| S0210 | Messangial cell, frac 2 | Messangial cell | | | | pSport1 |
| S0212 | Bone Marrow Stromal | Bone Marrow | | | | pSport1 |
| | Cell, untreated | Stromal | | | | |
| | | Cell, untreated | | | | |
| S0216 | Neutrophils IL-I and | human neutrophil | blood | Cell Line | | Uni-ZAP |
| | LPS induced | induced | | | | XR |
| S0222 | H. Frontal | H. Brain, Frontal | Brain | | disease | Uni-ZAP |
| | cortex, epileptic; re- | Cortex, Epileptic | | | | XR |
| | excision | | | | | |
| S0228 | PSMIX | PBLS, 7TM | | | | PCRII |
| | | receptor enriched | | | | |
| S0242 | Synovial Fibroblasts | Synovial Fibroblasts | | | | pSport1 |
| | (I11/TNF), subt | | | | | |
| S0250 | Human Osteoblasts II | Human Osteoblasts | Femur | | disease | pCMVSport |
| | | | | | | 2.0 |
| S0252 | 7TM-PIMIX | PBLS, 7TM | | | | PCRII |
| | | receptor enriched | | | | |
| S0260 | Spinal Cord, re- | Spinal cord | spinal cord | | | Uni-ZAP |
| | excision | | | | | XR |
| S0264 | PPMIX | PPMIX (Human | Pituitary | | | PCRII |
| | | Pituitary) | | | | |
| S0268 | PRMIX | PRMIX (Human | prostate | | | PCRII |
| | | Prostate) | | | | |
| S0270 | PTMIX | PTMIX (Human | Thymus | | | PCRII |
| | | Thymus) | | | | |
| S0274 | PCMIX | PCMIX (Human | Brain | | | PCRII |
| | | Cerebellum) | | | | |
| S0278 | H Macrophage (GM- | Macrophage (GM- | | | | Uni-ZAP |
| | CSF treated), re- | CSF treated) | | | | XR |
| | | excision | | | | |
| S0280 | Human Adipose | Human Adipose | | | | Uni-ZAP |
| | Tissue, re-excision | Tissue | | | | XR |
| S0282 | Brain Frontal Cortex, | Brain frontal cortex | Brain | | | Lambda |
| | re-excision | | | | | ZAP II |
| S0300 | Frontal | Frontal Lobe | Brain | | | Uni-ZAP |
| | lobe, dementia; | dementia/ | | | | XR |
| | re-excision | Alzheimer″s | | | | |
| S0314 | Human | Human | | | disease | pSport1 |
| | osteoarthritis; fraction I | osteoarthritic | | | | |
| | | cartilage | | | | |
| S0328 | Palate carcinoma | Palate carcinoma | Uvula | | disease | pSport1 |
| S0342 | Adipocytes; re-excision | Human Adipocytes | | | | Uni-ZAP |
| | | from Osteoclastoma | | | | XR |
| S0344 | Macrophage-oxLDL; | macrophage- | blood | Cell Line | | Uni-ZAP |
| | re-excision | oxidized LDL | | | | XR |
| | | treated | | | | |
| S0346 | Human Amygdala; re- | Amygdala | | | | Uni-ZAP |
| | excision | | | | | XR |
| S0350 | Pharynx Carcinoma | Pharynx carcinoma | Hypophary | | disease | pSport1 |
| | | | nx | | | |
| S0354 | Colon Normal II | Colon Normal | Colon | | | pSport1 |
| S0356 | Colon Carcinoma | Colon Carcinoma | Colon | | disease | pSport1 |
| S0358 | Colon Normal III | Colon Normal | Colon | | | pSport1 |
| S0360 | Colon Tumor II | Colon Tumor | Colon | | disease | pSport1 |
| S0362 | Human Gastrocnemius | Gastrocoemius | | | | pSport1 |
| | | muscle | | | | |
| S0364 | Human Quadriceps | Quadriceps muscle | | | | pSport1 |
| S0366 | Human Soleus | Soleus Muscle | | | | pSport1 |
| S0374 | Normal colon | Normal colon | | | | pSport1 |
| S0376 | Colon Tumor | Colon Tumor | | | disease | pSport1 |
| S0378 | Pancreas normal PCA4 | Pancreas Normal | | | | pSport1 |
| | No | PCA4No | | | | |
| S0380 | Pancreas Tumor PCA4 | Pancreas Tumor | | | disease | pSport1 |
| | Tu | PCA4Tu | | | | |
| S0388 | Human | Human | | | disease | Uni-ZAP |
| | Hypothalamus, schizop | Hypothalamus, | | | | XR |
| | hrenia, re-excision | Schizophrenia | | | | |
| S0390 | Smooth muscle, | Smooth muscle | Pulmanary | Cell Line | | Uni-ZAP |
| | control; re-excision | | artery | | | XR |
| S0396 | Uterus; normal | Uterus; normal | | | | pSport1 |
| S0404 | Rectum normal | Rectum, normal | | | | pSport1 |
| S0412 | Temporal cortex- | Temporal cortex, | | | disease | Other |
| | Alzheizmer; subtracted | alzheimer | | | | |
| S0418 | CHME Cell | CHME Cell Line; | | | | pCMVSport |
| | Line; treated 5 hrs | treated | | | | 3.0 |
| S0420 | CHME Cell | CHME Cell line, | | | | pSport1 |
| | Line, untreated | untreatetd | | | | |
| S0424 | TF-1 Cell Line GM- | TF-1 Cell Line | | | | pSport1 |
| | CSF Treated | GM-CSF Treated | | | | |
| S0426 | Monocyte activated; | Monocyte-activated | blood | Cell Line | | Uni-ZAP |
| | re-excision | | | | | XR |
| S0428 | Neutrophils control; re- | human neutrophils | blood | Cell Line | | Uni-ZAP |
| | excision | | | | | XR |
| S0434 | Stomach Normal | Stomach Normal | | | disease | pSport1 |
| S0442 | Colon Normal | Colon Normal | | | | pSport1 |
| S0444 | Colon Tumor | Colon Tumour | | | disease | pSport1 |
| S0458 | Thyroid Normal | Thyroid normal | | | | pSport1 |
| | (SDCA2 No) | | | | | |
| S3012 | Smooth Muscle Serum | Smooth muscle | Pulmanary | Cell Line | | pBluescript |
| | Treated, Norm | | artery | | | |
| S3014 | Smooth muscle, serum | Smooth muscle | Pulmanary | Cell Line | | pBluescript |
| | induced, re-exc | | artery | | | |
| S6016 | H. Frontal Cortex, | H. Brain, Frontal | Brain | | disease | Uni-ZAP |
| | Epileptic | Cortex, Epileptic | | | | XR |
| S6024 | Alzheimers, spongy | Alzheimer″s/Spongy | | disease | | Uni-ZAP |
| | change | Brain change | | | | XR |
| S6028 | Human Manic | Human Manic | Brain | | disease | Uni-ZAP |
| | Depression Tissue | depression tissue | | | | XR |
| T0003 | Human Fetal Lung | Human Fetal Lung | | | | pBluescript |
| | | | | | | SK- |
| T0006 | Human Pineal Gland | Human Pinneal | | | | pBluescript |
| | | Gland | | | | SK- |
| T0010 | Human Infant Brain | Human Infant Brain | | | | Other |
| T0041 | Jurkat T-cell G1 phase | Jurkat T-cell | | | | pBluescript |
| | | | | | | SK- |
| T0042 | Jurkat T-Cell, S phase | Jurkat T-Cell Line | | | | pBluescript |
| | | | | | | SK- |
| T0048 | Human Aortic | Human Aortic | | | | pBluescript |
| | Endothelium | Endothilium | | | | SK- |
| T0049 | Aorta endothelial | Aorta endothelial | | | | pBluescript |
| | cells + TNF-a | cells | | | | SK- |
| T0067 | Human Thyroid | Human Thyroid | | | | pBluescript |
| | | | | | | SK- |
| T0068 | Normal Ovary, | Normal Ovary, | | | | pBluescript |
| | Premenopausal | Premenopausal | | | | SK- |
| T0110 | Human colon | | | | | pBluescript |
| | carcinoma (HCC) cell | | | | | SK- |
| | line, remake | | | | | |
| T0114 | Human (Caco-2) cell | | | | | pBluescript |
| | line, adenocarcinoma, | | | | | SK- |
| | colon, remake | | | | | |
| T0115 | Human Colon | | | | | pBluescript |
| | Carcinoma (HCC) cell | | | | | SK- |
| | line | | | | | |
| L0005 | Clontech human aorta | | | | | |
| | polyA + mRNA | | | | | |
| | (#6572) | | | | | |
| L0021 | Human adult | | | | | |
| | (K. Okubo) | | | | | |
| L0155 | Human promyelocyte | | | | | |
| L0157 | Human fetal brain | | brain | | | |
| | (T Fujiwara) | | | | | |
| L0351 | Infant brain, Bento | | | | | BA, M13- |
| | Soares | | | | | derived |
| L0352 | Normalized infant | | | | | BA, M13- |
| | brain, Bento Soares | | | | | derived |
| L0362 | Stratagene ovarian | | | | | Bluescript |
| | cancer (#937219) | | | | | SK- |
| L0364 | NCI_CGAP_GC5 | germ cell tumor | | | | Bluescript |
| | | | | | | SK- |
| L0366 | Stratagene schizo brain | schizophrenic brain | | | | Bluescript |
| | Sh11 | S-11 frontal lobe | | | | SK- |
| L0367 | NCI_CGAP_Sch1 | Schwannoma tumor | | | | Bluescript |
| | | | | | | SK- |
| L0369 | NCI_CGAP_AA1 | adrenal adenoma | adrenal | | | Bluescript |
| | | | gland | | | SK- |
| L0371 | NCI_CGAP_Br3 | breast tumor | breast | | | Bluescript |
| | | | | | | SK- |
| L0372 | NCI_CGAP_Col2 | colon tumor | colon | | | Bluescript |
| | | | | | | SK- |
| L0374 | NCI_CGAP_Co2 | tumor | colon | | | Bluescript |
| | | | | | | SK- |
| L0381 | NCI_CGAP_HN4 | squamous cell | pharynx | | | Bluescript |
| | | carcinoma | | | | SK- |
| L0415 | b4HB3MA Cot8-HAP- | | | | | Lafmid BA |
| | Ft | | | | | |
| L0438 | normalized infant brain | total brain | brain | | | lafmid BA |
| | cDNA | | | | | |
| L0439 | Soares infant brain | | whole | | | Lafmid BA |
| | 1NIB | | brain | | | |
| L0455 | Human retina cDNA | retina | eye | | | lambda gt10 |
| | randomly primed | | | | | |
| | sublibrary | | | | | |
| L0456 | Human retina cDNA | retina | eye | | | lambda gt10 |
| | Tsp509I-cleaved | | | | | |
| | sublibrary | | | | | |
| L0462 | WATM1 | | | | | lambda gt11 |
| L0471 | Human fetal heart, | | | | | Lambda |
| | Lambda ZAP Express | | | | | ZAP |
| | | | | | | Express |
| L0476 | Fetal brain, Stratagene | | | | | Lambda |
| | | | | | | ZAP II |
| L0483 | Human pancreatic islet | | | | | Lambda |
| | | | | | | ZAPII |
| L0515 | NCI_CGAP_Ov32 | papillary serous | ovary | | | pAMP1 |
| | | carcinoma | | | | |
| L0517 | NCI_CGAP_Pr1 | | | | | pAMP10 |
| L0518 | NCI_CGAP_Pr2 | | | | | pAMP10 |
| L0521 | NCI_CGAP_Ew1 | Ewing″s sarcoma | | | | pAMP10 |
| L0527 | NCI_CGAP_Ov2 | ovary | | | | pAMP10 |
| L0542 | NCI_CGAP_Pr11 | normal prostatic | prostate | | | pAMP10 |
| | | epithelial cells | | | | |
| L0564 | Jia bone marrow | bone marrow stroma | | | | pBluescript |
| | stroma | | | | | |
| L0565 | Normal Human | Bone | Hip | | | pBluescript |
| | Trabecular Bone Cells | | | | | |
| L0586 | HTCDL1 | | | | | pBluescript |
| | | | | | | SK(−) |
| L0588 | Stratagene endothelial | | | | | pBluescript |
| | cell 937223 | | | | | SK- |
| L0589 | Stratagene fetal retina | | | | | pBluescript |
| | 937202 | | | | | SK- |
| L0592 | Stratagene hNT neuron | | | | | pBluescript |
| | (#937233) | | | | | SK- |
| L0593 | Stratagene | | | | | pBluescript |
| | neuroepithelium | | | | | SK- |
| | (#937231) | | | | | |
| L0595 | Stratagene NT2 | neuroepithelial cells | brain | | | pBluescript |
| | neuronal precursor | | | | | SK- |
| | 937230 | | | | | |
| L0596 | Stratagene colon | | colon | | | pBluescript |
| | (#937204) | | | | | SK- |
| L0599 | Stratagene lung | | lung | | | pBluescript |
| | (#937210) | | | | | SK- |
| L0601 | Stratagene pancreas | | pancreas | | | pBluescript |
| | (#937208) | | | | | SK- |
| L0603 | Stratagene placenta | | placenta | | | pBluescript |
| | (#937225) | | | | | SK- |
| L0604 | Stratagene muscle | muscle | skeletal | | | pBluescript |
| | 937209 | | muscle | | | SK- |
| L0605 | Stratagene fetal spleen | fetal spleen | spleen | | | pBluescript |
| | (#937205) | | | | | SK- |
| L0607 | NCI_CGAP_Lym6 | mantle cell | lymph | | | pBluescript |
| | | lymphoma | node | | | SK- |
| L0608 | Stratagene lung | lung carcinoma | lung | NCI-H69 | | pBluescript |
| | carcinoma 937218 | | | | | SK- |
| L0612 | Schiller | oligodendroglioma | brain | | | pBluescript |
| | oligodendroglioma | | | | | SK- |
| | | | | | | (Stratagene) |
| L0622 | HM1 | | | | | pcDNAII |
| | | | | | | (Invitrogen) |
| L0623 | HM3 | pectoral muscle | | | | pcDNAII |
| | | (after mastectomy) | | | | (Invitrogen) |
| L0626 | NCI_CGAP_GCl | bulk germ cell | | | | pCMV- |
| | | seminoma | | | | SPORT2 |
| L0640 | NCI_CGAP_Br18 | four pooled high- | breast | | | pCMV- |
| | | grade tumors, | | | | SPORT6 |
| | | including two prima | | | | |
| L0641 | NCI_CGAP_Co17 | juvenile granulosa | colon | | | pCMV- |
| | | tumor | | | | SPORT6 |
| L0644 | NCI_CGAP_Co20 | moderately | colon | | | pCMV- |
| | | differentiated | | | | SPORT6 |
| | | adenocarcinoma | | | | |
| L0645 | NCI_CGAP_Co21 | moderately | colon | | | pCMV- |
| | | differentiated | | | | SPORT6 |
| | | adenocarcinoma | | | | |
| L0646 | NCI_CGAP_Col4 | moderately- | colon | | | pCMV- |
| | | differentiated | | | | SPORT6 |
| | | adenocarcinoma | | | | |
| L0647 | NCI_CGAP_Sar4 | five pooled | connective | | | pCMV- |
| | sarcomas, including | tissue | | | | SPORT6 |
| | myxoid hposarcoma | | | | | |
| L0648 | NCI_CGAP_Eso2 | squamous cell | esophagus | | | pCMV |
| | | carcinoma | | | | SPORT6 |
| L0650 | NCI_CGAP_Kid13 | 2 pooled Wilms″ | kidney | | | pCMV- |
| | | tumors, one primary | | | | SPORT6 |
| | | and one metast | | | | |
| L0653 | NCI_CGAP_Lu28 | two pooled | lung | | | pCMV- |
| | | squamous cell | | | | SPORT6 |
| | | carcinomas | | | | |
| L0655 | NCI_CGAP_Lym12 | lymphoma, | lymph | | | pCMV- |
| | | follicular mixed | node | | | SPORT6 |
| | | small and large cell | | | | |
| L0656 | NCI_CGAP_Ov38 | normal epithelium | ovary | | | pCMV- |
| | | | | | | SPORT6 |
| L0657 | NCI_CGAP_Ov23 | tumor, 5 pooled (see | ovary | | | pCMV- |
| | | description) | | | | SPORT6 |
| L0659 | NCI_CGAP_Pan1 | adenocarcinoma | pancreas | | | pCMV- |
| | | | | | | SPORT6 |
| L0662 | NCI_CGAP_Gas4 | poorly differentiated | stomach | | | pCMV- |
| | | adenocarcinoma | | | | SPORT6 |
| | | with signet r | | | | |
| L0663 | NCI_CGAP_Ut2 | moderately- | uterus | | | pCMV- |
| | | differentiated | | | | SPORT6 |
| | | endometrial | | | | |
| | | adenocarcino | | | | |
| L0664 | NCI_CGAP_Ut3 | poorly-differentiated | uterus | | | pCMV- |
| | | endometrial | | | | SPORT6 |
| | | adenocarcinoma, | | | | |
| L0665 | NCI_CGAP_Ut4 | serous papillary | uterus | | | pCMV |
| | | carcinoma, high | | | | SPORT6 |
| | | grade, 2 pooled | | | | |
| L0666 | NCI_CGAP_Ut1 | well-differentiated | uterus | | | pCMV- |
| | | endometrial | | | | SPORT6 |
| | | adenocarcinoma, 7 | | | | |
| L0667 | NCI_CGAP_CML1 | myeloid cells, 18 | whole | | | pCMV- |
| | | pooled CML cases, | blood | | | SPORT6 |
| | | BCR/ABL rearra | | | | |
| L0717 | Gessler Wilms tumor | | | | | pSPORT1 |
| L0731 | Soares_pregnant_uteru | | uterus | | | pT7T3-Pac |
| | s_NbHPU | | | | | |
| L0738 | Human colorectal | | | | | pT7T3D |
| | cancer | | | | | |
| L0740 | Soares melanocyte | melanocyte | | | | pT7T3D |
| | 2NbHM | | | | | (Pharmacia) |
| | | | | | | with a |
| | | | | | | modified |
| | | | | | | polylinker |
| L0741 | Soares adult brain | brain | | | | pT7T3D |
| | N2MHB55Y | | | | | (Pharmacia) |
| | | | | | | with a |
| | | | | | | modified |
| | | | | | | polylinker |
| L0742 | Soares adult brain | brain | | | | pT7T3D |
| | N2b5HB55Y | | | | | (Pharmacia) |
| | | | | | | with a |
| | | | | | | modified |
| | | | | | | polylinker |
| L0743 | Soares breast 2NbHBst | | breast | | | pT7T3D |
| | | | | | | (Pharmacia) |
| | | | | | | with a |
| | | | | | | modified |
| | | | | | | polylinker |
| L0744 | Soares breast 3NbHBst | | breast | | | pT7T3D |
| | | | | | | (Pharmacia) |
| | | | | | | with a |
| | | | | | | modified |
| | | | | | | polylinker |
| L0745 | Soares retina N2b4HR | retina | eye | | | pT7T3D |
| | | | | | | (Pharmacia) |
| | | | | | | with a |
| | | | | | | modified |
| | | | | | | polylinker |
| L0746 | Soares retina N2b5HR | retina | eye | | | pT7T3D |
| | | | | | | (Pharmacia) |
| | | | | | | with a |
| | | | | | | modified |
| | | | | | | polylinker |
| L0747 | Soares_fetal_heart_Nb | | heart | | | pT7T3D |
| | HH19W | | | | | (Pharmacia) |
| | | | | | | with a |
| | | | | | | modified |
| | | | | | | polylinker |
| L0748 | Soares fetal liver | | Liver and | | | pT7T3D |
| | spleen 1NFLS | | Spleen | | | (Pharmacia) |
| | | | | | | with a |
| | | | | | | modified |
| | | | | | | polylinker |
| L0749 | Soares_fetal_liver_sple | | Liver and | | | pT7T3D |
| | en_1NFLS_S1 | | Spleen | | | (Pharmacia) |
| | | | | | | with a |
| | | | | | | modified |
| | | | | | | polylinker |
| L0750 | Soares_fetal_lung_Nb | | lung | | | pT7T3D |
| | HL19W | | | | | (Pharmacia) |
| | | | | | | with a |
| | | | | | | modified |
| | | | | | | polylinker |
| L0751 | Soares ovary tumor | ovarian tumor | ovary | | | pT7T3D |
| | NbHOT | | | | | (Pharmacia) |
| | | | | | | with a |
| | | | | | | modified |
| | | | | | | polylinker |
| L0752 | Soares_parathyroid_tu | parathyroid tumor | parathyroi | | | pT7T3D |
| | mor_NbHPA | | d gland | | | (Pharmacia) |
| | | | | | | with a |
| | | | | | | modified |
| | | | | | | polylinker |
| L0753 | Soares_pineal_gland_ | | pineal | | | pT7T3D |
| | N3HPG | | gland | | | (Pharmacia) |
| | | | | | | with a |
| | | | | | | modified |
| | | | | | | polylinker |
| L0754 | Soares placenta Nb2HP | | placenta | | | pT7T3D |
| | | | | | | (Pharmacia) |
| | | | | | | with a |
| | | | | | | modified |
| | | | | | | polylinker |
| L0755 | Soares_placenta_8to9w | | placenta | | | pT7T3D |
| | eeks_2NbHP8to9W | | | | | (Pharmacia) |
| | | | | | | with a |
| | | | | | | modified |
| | | | | | | polylinker |
| L0756 | Soares_multiple_sclero | multiple sclerosis | | | | pT7T3D |
| | sis_2NbHMSP | lesions | | | | (Pharmacia) |
| | | | | | | with a |
| | | | | | | modified |
| | | | | | | polylinker |
| | | | | | | V_TYPE |
| L0757 | Soares_senescent_fibro | senescent fibroblast | | | | pT7T3D |
| | blasts_NbHSF | | | | | (Pharmacia) |
| | | | | | | with a |
| | | | | | | modified |
| | | | | | | polylinker |
| | | | | | | V_TYPE |
| L0758 | Soares_testis_NHT | | | | | pT7T3D-Pac |
| | | | | | | (Pharmacia) |
| | | | | | | with a |
| | | | | | | modified |
| | | | | | | polylinker |
| L0759 | Soares_total_fetus_Nb | | | | | pT7T3D-Pac |
| | 2HF8_9w | | | | | (Pharmacia) |
| | | | | | | with a |
| | | | | | | modified |
| | | | | | | polylinker |
| L0761 | NCI_CGAP_CLL1 | B-cell, chronic | | | | pT7T3D-Pac |
| | | lymphotic leukemia | | | | (Pharmacia) |
| | | | | | | with a |
| | | | | | | modified |
| | | | | | | polylinker |
| L0763 | NCI_CGAP_Br2 | breast | | | | pT7T3D-Pac |
| | | | | | | (Pharmacia) |
| | | | | | | with a |
| | | | | | | modified |
| | | | | | | polylinker |
| L0764 | NCI_CGAP_Co3 | colon | | | | pT7T3D-Pac |
| | | | | | | (Pharmacia) |
| | | | | | | with a |
| | | | | | | modified |
| | | | | | | polylinker |
| L0765 | NCI_CGAP_Co4 | colon | | | | pT7T3D-Pac |
| | | | | | | (Pharmacia) |
| | | | | | | with a |
| | | | | | | modified |
| | | | | | | polylinker |
| L0766 | NCI_CGAP_GCB1 | germinal center B | | | | pT7T3D-Pac |
| | cell | | | | | (Pharmacia) |
| | | | | | | with a |
| | | | | | | modified |
| | | | | | | polylinker |
| L0767 | NCI_CGAP_GC3 | pooled germ cell | | | | pT7T3D-Pac |
| | | tumors | | | | (Pharmacia) |
| | | | | | | with a |
| | | | | | | modified |
| | | | | | | polylinker |
| L0768 | NCI_CGAP_GC4 | pooled germ cell | | | | pT7T3D-Pac |
| | | tumors | | | | (Pharmacia) |
| | | | | | | with a |
| | | | | | | modified |
| | | | | | | polylinker |
| L0769 | NCI_CGAP_Brn25 | anaplastic | brain | | | pT7T3D-Pac |
| | | oligodendroglioma | | | | (Pharmacia) |
| | | | | | | with a |
| | | | | | | modified |
| | | | | | | polylinker |
| L0770 | NCI_CGAP_Brn23 | glioblastoma | brain | | | pT7T3D-Pac |
| | | (pooled) | | | | (Pharmacia) |
| | | | | | | with a |
| | | | | | | modified |
| | | | | | | polylinker |
| L0771 | NCI_CGAP Co8 | adenocarcinoma | colon | | | pT7T3D-Pac |
| | | | | | | (Pharmacia) |
| | | | | | | with a |
| | | | | | | modified |
| | | | | | | polylinker |
| L0772 | NCI_CGAP_Co10 | colon tumor RER+ | colon | | | pT7T3D-Pac |
| | | | | | | (Pharmacia) |
| | | | | | | with a |
| | | | | | | modified |
| | | | | | | polylinker |
| L0773 | NCI_CGAP_Co9 | colon tumor RER+ | colon | | | pT7T3D-Pac |
| | | | | | | (Pharmacia) |
| | | | | | | with a |
| | | | | | | modified |
| | | | | | | polylinker |
| L0774 | NCI_CGAP_Kid3 | kidney | | | | pT7T3D-Pac |
| | | | | | | (Pharmacia) |
| | | | | | | with a |
| | | | | | | modified |
| | | | | | | polylinker |
| L0775 | NCI_CGAP_Kid5 | 2 pooled tumors | kidney | | | pT7T3D-Pac |
| | | (clear cell type) | | | | (Pharmacia) |
| | | | | | | with a |
| | | | | | | modified |
| | | | | | | polylinker |
| L0776 | NCI_CGAP_Lu5 | carcinoid | lung | | | pT7T3D-Pac |
| | | | | | | (Pharmacia) |
| | | | | | | with a |
| | | | | | | modified |
| | | | | | | polylinker |
| L0777 | Soares_NhHMPu_S1 | Pooled human | mixed (see | | | pT7T3D-Pac |
| | | melanocyte, fetal | below) | | | (Pharmacia) |
| | | heart, and pregnant | | | | with a |
| | | | | | | modified |
| | | | | | | polylinker |
| L0779 | Soares_NFL_T_GBC_ | | pooled | | | pT7T3D-Pac |
| | S1 | | | | | (Pharmacia) |
| | | | | | | with a |
| | | | | | | modified |
| | | | | | | polylinker |
| L0780 | Soares_NSF_F8_9W_ | | pooled | | | pT7T3D-Pac |
| | OT_PA_P_S1 | | | | | (Pharmacia) |
| | | | | | | with a |
| | | | | | | modified |
| | | | | | | polylinker |
| L0783 | NCI_CGAP_Pr22 | normal prostate | prostate | | | pT7T3D-Pac |
| | | | | | | (Pharmacia) |
| | | | | | | with a |
| | | | | | | modified |
| | | | | | | polylinker |
| L0787 | NCI_CGAP_Sub1 | | | | | pT7T3D-Pac |
| | | | | | | (Pharmacia) |
| | | | | | | with a |
| | | | | | | modified |
| | | | | | | polylinker |
| L0788 | NCI_CGAP_Sub2 | | | | | pT7T3D-Pac |
| | | | | | | (Pharmacia) |
| | | | | | | with a |
| | | | | | | modified |
| | | | | | | polylinker |
| L0789 | NCI_CGAP_Sub3 | | | | | pT7T3D-Pac |
| | | | | | | (Pharmacia) |
| | | | | | | with a |
| | | | | | | modified |
| | | | | | | polylinker |
| L0790 | NCI_CGAP_Sub4 | | | | | pT7T3D-Pac |
| | | | | | | (Pharmacia) |
| | | | | | | with a |
| | | | | | | modified |
| | | | | | | polylinker |
| L0791 | NCI_CGAP_Sub5 | | | | | pT7T3D-Pac |
| | | | | | | (Pharmacia) |
| | | | | | | with a |
| | | | | | | modified |
| | | | | | | polylinker |
| L0792 | NCI_CGAP_Sub6 | | | | | pT7T3D-Pac |
| | | | | | | (Pharmacia) |
| | | | | | | with a |
| | | | | | | modified |
| | | | | | | polylinker |
| L0794 | NCI_CGAP_GC6 | pooled germ cell | | | | pT7T3D-Pac |
| | | tumors | | | | (Pharmacia) |
| | | | | | | with a |
| | | | | | | modified |
| | | | | | | polylinker |
| L0800 | NCI_CGAP_Co16 | colon tumor, RER+ | colon | | | pT7T3D-Pac |
| | | | | | | (Pharmacia) |
| | | | | | | with a |
| | | | | | | modified |
| | | | | | | polylinker |
| L0803 | NCI_CGAP_Kid11 | | kidney | | | pT7T3D-Pac |
| | | | | | | (Pharmacia) |
| | | | | | | with a |
| | | | | | | modified |
| | | | | | | polylinker |
| L0804 | NCI_CGAP_Kid12 | 2 pooled tumors | kidney | | | pT7T3D-Pac |
| | | (clear cell type) | | | | (Pharmacia) |
| | | | | | | with a |
| | | | | | | modified |
| | | | | | | polylinker |
| L0805 | NCI_CGAP_Lu24 | carcinoid | lung | | | pT7T3D-Pac |
| | | | | | | (Pharmacia) |
| | | | | | | with a |
| | | | | | | modified |
| | | | | | | polylinker |
| L0806 | NCI_CGAP_Lu19 | squamous cell | lung | | | pT7T3D-Pac |
| | | carcinoma, poorly | | | | (Pharmacia) |
| | | differentiated (4 | | | | with a |
| | | | | | | modified |
| | | | | | | polylinker |
| L0807 | NCI_CGAP_Ov18 | fibrotheoma | ovary | | | pT7T3D-Pac |
| | | | | | | (Pharmacia) |
| | | | | | | with a |
| | | | | | | modified |
| | | | | | | polylinker |
| L0809 | NCI_CGAP_Pr28 | prostate | | | | pT7T3D-Pac |
| | | | | | | (Pharmacia) |
| | | | | | | with a |
| | | | | | | modified |
| | | | | | | polylinker |

[0127] TABLE 5

| OMIM | |
|---|---|
| Reference | Description |
| 109270 | Renal tubular acidosis, distal, 179800 |
| 109270 | Spherocytosis, hereditary |
| 109270 | [Acanthocytosis, one form] |
| 109270 | [Elliptocytosis, Malaysian-Melanesian type] |
| 109270 | Hemolytic anemia due to band 3 defect |
| 113705 | Ovarian cancer |
| 113705 | Breast cancer-1 |
| 144200 | Epidermolytic palmoplantar keratoderma |
| 148065 | White sponge nevus, 193900 |
| 148066 | Epidermolysis bullosa simplex, Koebner, Dowling-Meara, and |
| | Weber-Cockayne types, 131900, 131760, 131800 |
| 148066 | Epidermolysis bullosa simplex, recessive, 601001 |
| 148067 | Nonepidermolytic palmoplantar keratoderma, 600962 |
| 148067 | Pachyonychia congenita, Jadassohn-Lewandowsky |
| | type, 167200 |
| 148069 | Pachyonychia congenita, Jackson-Lawler type, 167210 |
| 148080 | Epidermolytic hyperkeratosis, 113800 |
| 154275 | Malignant hyperthermia susceptibility 2 |
| 168610 | Parkinsonism-dementia with pallidopontonigral degeneration |
| 171190 | Hypertension, essential, 145500 |
| 176705 | Breast cancer, sporadic |
| 185800 | Symphalangism, proximal |
| 200350 | Acetyl-CoA carboxlase deficiency |
| 221820 | Gliosis, familial progressive subcortical |
| 232200 | Glycogen storage disease I |
| 249000 | Meckel syndrome |
| 252920 | Sanfilippo syndrome, type B |
| 253250 | Mulibrey nanism |
| 600119 | Muscular dystrophy, Duchenne-like, type 2 |
| 600119 | Adhalinopathy, primary |
| 601363 | Wilms tumor, type 4 |
| 601844 | Pseudohypoaldosteronism type II |

[0128] Polynucleotide and Polypeptide Variants

[0129] The present invention is directed to variants of the polynucleotide sequence disclosed in SEQ ID NO:X or the complementary strand thereto, nucleotide sequences encoding the polypeptide of SEQ ID NO:Y, the nucleotide sequence of SEQ ID NO:X encoding the polypeptide sequence as defined in column 7 of Table 1A, nucleotide sequences encoding the polypeptide as defined in column 7 of Table 1A, the nucleotide sequence as defined in columns 8 and 9 of Table 2, nucleotide sequences encoding the polypeptide encoded by the nucleotide sequence as defined in columns 8 and 9 of Table 2, the nucleotide sequence as defined in column 6 of Table 1B, nucleotide sequences encoding the polypeptide encoded by the nucleotide sequence as defined in column 6 of Table 1B, the cDNA sequence contained in Clone ID NO:Z, and/or nucleotide sequences encoding the polypeptide encoded by the cDNA sequence contained in Clone ID NO:Z.

[0130] The present invention also encompasses variants of the polypeptide sequence disclosed in SEQ ID NO:Y, the polypeptide sequence as defined in column 7 of Table 1A, a polypeptide sequence encoded by the polynucleotide sequence in SEQ ID NO:X, a polypeptide sequence encoded by the nucleotide sequence as defined in columns 8 and 9 of Table 2, a polypeptide sequence encoded by the nucleotide sequence as defined in column 6 of Table 1B, a polypeptide sequence encoded by the complement of the polynucleotide sequence in SEQ ID NO:X, and/or a polypeptide sequence encoded by the cDNA sequence contained in Clone ID NO:Z.

[0131] “Variant” refers to a polynucleotide or polypeptide differing from the polynucleotide or polypeptide of the present invention, but retaining essential properties thereof. Generally, variants are overall closely similar, and, in many regions, identical to the polynucleotide or polypeptide of the present invention.

[0132] Thus, one aspect of the invention provides an isolated nucleic acid molecule comprising, or alternatively consisting of, a polynucleotide having a nucleotide sequence selected from the group consisting of: (a) a nucleotide sequence described in SEQ ID NO:X or contained in the cDNA sequence of Clone ID NO:Z; (b) a nucleotide sequence in SEQ ID NO:X or the cDNA in Clone ID NO:Z which encodes the complete amino acid sequence of SEQ ID NO:Y or the complete amino acid sequence encoded by the cDNA in Clone ID NO:Z; (c) a nucleotide sequence in SEQ ID NO:X or the cDNA in Clone ID NO:Z which encodes a mature polypeptide; (d) a nucleotide sequence in SEQ ID NO:X or the cDNA sequence of Clone ID NO:Z, which encodes a biologically active fragment of a polypeptide; (e) a nucleotide sequence in SEQ ID NO:X or the cDNA sequence of Clone ID NO:Z, which encodes an antigenic fragment of a polypeptide; (f) a nucleotide sequence encoding a polypeptide comprising the complete amino acid sequence of SEQ ID NO:Y or the complete amino acid sequence encoded by the cDNA in Clone ID NO:Z; (g) a nucleotide sequence encoding a mature polypeptide of the amino acid sequence of SEQ ID NO:Y or the amino acid sequence encoded by the cDNA in Clone ID NO:Z; (h) a nucleotide sequence encoding a biologically active fragment of a polypeptide having the complete amino acid sequence of SEQ ID NO:Y or the complete amino acid sequence encoded by the cDNA in Clone ID NO:Z; (i) a nucleotide sequence encoding an antigenic fragment of a polypeptide having the complete amino acid sequence of SEQ ID NO:Y or the complete amino acid sequence encoded by the cDNA in Clone ID NO:Z; and (j) a nucleotide sequence complementary to any of the nucleotide sequences in (a), (b), (c), (d), (e), (f), (g), (h), or (i) above.

[0133] The present invention is also directed to nucleic acid molecules which comprise, or alternatively consist of, a nucleotide sequence which is at least 80%, 85%, 90%, 95%, 96%, 97%, 98%, 99% or 100%, identical to, for example, any of the nucleotide sequences in (a), (b), (c), (d), (e), (f), (g), (h), (i), or (j) above, the nucleotide coding sequence in SEQ ID NO:X or the complementary strand thereto, the nucleotide coding sequence of the cDNA contained in Clone ID NO:Z or the complementary strand thereto, a nucleotide sequence encoding the polypeptide of SEQ ID NO:Y, a nucleotide sequence encoding a polypeptide sequence encoded by the nucleotide sequence in SEQ ID NO:X, a polypeptide sequence encoded by the complement of the polynucleotide sequence in SEQ ID NO:X, a nucleotide sequence encoding the polypeptide encoded by the cDNA contained in Clone ID NO:Z, the nucleotide coding sequence in SEQ ID NO:X as defined in columns 8 and 9 of Table 2 or the complementary strand thereto, a nucleotide sequence encoding the polypeptide encoded by the nucleotide sequence in SEQ ID NO:X as defined in columns 8 and 9 of Table 2 or the complementary strand thereto, the nucleotide coding sequence in SEQ ID NO:B as defined in column 6 of Table 1B or the complementary strand thereto, a nucleotide sequence encoding the polypeptide encoded by the nucleotide sequence in SEQ ID NO:B as defined in column 6 of Table 1B or the complementary strand thereto, the nucleotide sequence in SEQ ID NO:X encoding the polypeptide sequence as defined in column 7 of Table 1A or the complementary strand thereto, nucleotide sequences encoding the polypeptide as defined in column 7 of Table 1A or the complementary strand thereto, and/or polynucleotide fragments of any of these nucleic acid molecules (e.g., those fragments described herein). Polynucleotides which hybridize to the complement of these nucleic acid molecules under stringent hybridization conditions or alternatively, under lower stringency conditions, are also encompassed by the invention, as are polypeptides encoded by these polynucleotides and nucleic acids.

[0134] In a preferred embodiment, the invention encompasses nucleic acid molecules which comprise, or alternatively, consist of a polynucleotide which hybridizes under stringent hybridization conditions, or alternatively, under lower stringency conditions, to a polynucleotide in (a), (b), (c), (d), (e), (f), (g), (h), or (i), above, as are polypeptides encoded by these polynucleotides. In another preferred embodiment, polynucleotides which hybridize to the complement of these nucleic acid molecules under stringent hybridization conditions, or alternatively, under lower stringency conditions, are also encompassed by the invention, as are polypeptides encoded by these polynucleotides.

[0135] In another embodiment, the invention provides a purified protein comprising, or alternatively consisting of, a polypeptide having an amino acid sequence selected from the group consisting of: (a) the complete amino acid sequence of SEQ ID NO:Y or the complete amino acid sequence encoded by the cDNA in Clone ID NO:Z; (b) the amino acid sequence of a mature form of a polypeptide having the amino acid sequence of SEQ ID NO:Y or the amino acid sequence encoded by the cDNA in Clone ID NO:Z; (c) the amino acid sequence of a biologically active fragment of a polypeptide having the complete amino acid sequence of SEQ ID NO:Y or the complete amino acid sequence encoded by the cDNA in Clone ID NO:Z; and (d) the amino acid sequence of an antigenic fragment of a polypeptide having the complete amino acid sequence of SEQ ID NO:Y or the complete amino acid sequence encoded by the cDNA in Clone ID NO:Z.

[0136] The present invention is also directed to proteins which comprise, or alternatively consist of, an amino acid sequence which is at least 80%, 85%, 90%, 95%, 96%, 97%, 98%, 99% or 100%, identical to, for example, any of the amino acid sequences in (a), (b), (c), or (d), above, the amino acid sequence shown in SEQ ID NO:Y, the amino acid sequence encoded by the cDNA contained in Clone ID NO:Z, the amino acid sequence of the polypeptide encoded by the nucleotide sequence in SEQ ID NO:X as defined in columns 8 and 9 of Table 2, the amino acid sequence of the polypeptide encoded by the nucleotide sequence in SEQ ID NO:B as defined in column 6 of Table 1B, the amino acid sequence as defined in column 7 of Table 1A, an amino acid sequence encoded by the nucleotide sequence in SEQ ID NO:X, and an amino acid sequence encoded by the complement of the polynucleotide sequence in SEQ ID NO:X. Fragments of these polypeptides are also provided (e.g., those fragments described herein). Further proteins encoded by polynucleotides which hybridize to the complement of the nucleic acid molecules encoding these amino acid sequences under stringent hybridization conditions or alternatively, under lower stringency conditions, are also encompassed by the invention, as are the polynucleotides encoding these proteins.

[0137] By a nucleic acid having a nucleotide sequence at least, for example, 95% “identical” to a reference nucleotide sequence of the present invention, it is intended that the nucleotide sequence of the nucleic acid is identical to the reference sequence except that the nucleotide sequence may include up to five point mutations per each 100 nucleotides of the reference nucleotide sequence encoding the polypeptide. In other words, to obtain a nucleic acid having a nucleotide sequence at least 95% identical to a reference nucleotide sequence, up to 5% of the nucleotides in the reference sequence may be deleted or substituted with another nucleotide, or a number of nucleotides up to 5% of the total nucleotides in the reference sequence may be inserted into the reference sequence. The query sequence may be an entire sequence referred to in Table 1A or 2 as the ORF (open reading frame), or any fragment specified as described herein.

[0138] As a practical matter, whether any particular nucleic acid molecule or polypeptide is at least 80%, 85%, 90%, 95%, 96%, 97%, 98% or 99% identical to a nucleotide sequence of the present invention can be determined conventionally using known computer programs. A preferred method for determining the best overall match between a query sequence (a sequence of the present invention) and a subject sequence, also referred to as a global sequence alignment, can be determined using the FASTDB computer program based on the algorithm of Brutlag et al. (Comp. App. Biosci. 6:237-245 (1990)). In a sequence alignment the query and subject sequences are both DNA sequences. An RNA sequence can be compared by converting U's to T's. The result of said global sequence alignment is expressed as percent identity. Preferred parameters used in a FASTDB alignment of DNA sequences to calculate percent identity are: Matrix=Unitary, k-tuple=4, Mismatch Penalty=1, Joining Penalty=30, Randomization Group Length=0, Cutoff Score=1, Gap Penalty=5, Gap Size Penalty 0.05, Window Size=500 or the length of the subject nucleotide sequence, whichever is shorter.

[0139] If the subject sequence is shorter than the query sequence because of 5′ or 3′ deletions, not because of internal deletions, a manual correction must be made to the results. This is because the FASTDB program does not account for 5′ and 3′ truncations of the subject sequence when calculating percent identity. For subject sequences truncated at the 5′ or 3′ ends, relative to the query sequence, the percent identity is corrected by calculating the number of bases of the query sequence that are 5′ and 3′ of the subject sequence, which are not matched/aligned, as a percent of the total bases of the query sequence. Whether a nucleotide is matched/aligned is determined by results of the FASTDB sequence alignment. This percentage is then subtracted from the percent identity, calculated by the above FASTDB program using the specified parameters, to arrive at a final percent identity score. This corrected score is what is used for the purposes of the present invention. Only bases outside the 5′ and 3′ bases of the subject sequence, as displayed by the FASTDB alignment, which are not matched/aligned with the query sequence, are calculated for the purposes of manually adjusting the percent identity score.

[0140] For example, a 90 base subject sequence is aligned to a 100 base query sequence to determine percent identity. The deletions occur at the 5′ end of the subject sequence and therefore, the FASTDB alignment does not show a matched/alignment of the first 10 bases at 5′ end. The 10 unpaired bases represent 10% of the sequence (number of bases at the 5′ and 3′ ends not matched/total number of bases in the query sequence) so 10% is subtracted from the percent identity score calculated by the FASTDB program. If the remaining 90 bases were perfectly matched the final percent identity would be 90%. In another example, a 90 base subject sequence is compared with a 100 base query sequence. This time the deletions are internal deletions so that there are no bases on the 5′ or 3′ of the subject sequence which are not matched/aligned with the query. In this case the percent identity calculated by FASTDB is not manually corrected. Once again, only bases 5′ and 3′ of the subject sequence which are not matched/aligned with the query sequence are manually corrected for. No other manual corrections are to be made for the purposes of the present invention.

[0141] By a polypeptide having an amino acid sequence at least, for example, 95% “identical” to a query amino acid sequence of the present invention, it is intended that the amino acid sequence of the subject polypeptide is identical to the query sequence except that the subject polypeptide sequence may include up to five amino acid alterations per each 100 amino acids of the query amino acid sequence. In other words, to obtain a polypeptide having an amino acid sequence at least 95% identical to a query amino acid sequence, up to 5% of the amino acid residues in the subject sequence may be inserted, deleted, (indels) or substituted with another amino acid. These alterations of the reference sequence may occur at the amino or carboxy terminal positions of the reference amino acid sequence or anywhere between those terminal positions, interspersed either individually among residues in the reference sequence or in one or more contiguous groups within the reference sequence.

[0142] As a practical matter, whether any particular polypeptide is at least 80%, 85%, 90%, 95%, 96%, 97%, 98% or 99% identical to, for instance, the amino acid sequence of a polypeptide referred to in Table 1A (e.g., the amino acid sequence identified in column 6) or Table 2 (e.g., the amino acid sequence of the polypeptide encoded by the polynucleotide sequence defined in columns 8 and 9 of Table 2) or a fragment thereof, the amino acid sequence of the polypeptide encoded by the polynucleotide sequence in SEQ ID NO:B as defined in column 6 of Table 1B or a fragment thereof, the amino acid sequence of the polypeptide encoded by the nucleotide sequence in SEQ ID NO:X or a fragment thereof, or the amino acid sequence of the polypeptide encoded by cDNA contained in Clone ID NO:Z, or a fragment thereof, can be determined conventionally using known computer programs. A preferred method for determining the best overall match between a query sequence (a sequence of the present invention) and a subject sequence, also referred to as a global sequence alignment, can be determined using the FASTDB computer program based on the algorithm of Brutlag et al. (Comp. App. Biosci.6:237-245 (1990)). In a sequence alignment the query and subject sequences are either both nucleotide sequences or both amino acid sequences. The result of said global sequence alignment is expressed as percent identity. Preferred parameters used in a FASTDB amino acid alignment are: Matrix=PAM 0, k-tuple=12, Mismatch Penalty=

[0143] 1, Joining Penalty=20, Randomization Group Length=0, Cutoff Score=1, Window Size=sequence length, Gap Penalty=5, Gap Size Penalty=0.05, Window Size=500 or the length of the subject amino acid sequence, whichever is shorter.

[0144] If the subject sequence is shorter than the query sequence due to N- or C-terminal deletions, not because of internal deletions, a manual correction must be made to the results. This is because the FASTDB program does not account for N- and C-terminal truncations of the subject sequence when calculating global percent identity. For subject sequences truncated at the N- and C-termini, relative to the query sequence, the percent identity is corrected by calculating the number of residues of the query sequence that are N- and C-terminal of the subject sequence, which are not matched/aligned with a corresponding subject residue, as a percent of the total bases of the query sequence. Whether a residue is matched/aligned is determined by results of the FASTDB sequence alignment. This percentage is then subtracted from the percent identity, calculated by the above FASTDB program using the specified parameters, to arrive at a final percent identity score. This final percent identity score is what is used for the purposes of the present invention. Only residues to the N- and C-termini of the subject sequence, which are not matched/aligned with the query sequence, are considered for the purposes of manually adjusting the percent identity score. That is, only query residue positions outside the farthest N- and C-terminal residues of the subject sequence.

[0145] For example, a 90 amino acid residue subject sequence is aligned with a 100 residue query sequence to determine percent identity. The deletion occurs at the N-terminus of the subject sequence and therefore, the FASTDB alignment does not show a matching/alignment of the first 10 residues at the N-terminus. The 10 unpaired residues represent 10% of the sequence (number of residues at the N- and C-termini not matched/total number of residues in the query sequence) so 10% is subtracted from the percent identity score calculated by the FASTDB program. If the remaining 90 residues were perfectly matched the final percent identity would be 90%. In another example, a 90 residue subject sequence is compared with a 100 residue query sequence. This time the deletions are internal deletions so there are no residues at the N- or C-termini of the subject sequence which are not matched/aligned with the query. In this case the percent identity calculated by FASTDB is not manually corrected. Once again, only residue positions outside the N- and C-terminal ends of the subject sequence, as displayed in the FASTDB alignment, which are not matched/aligned with the query sequnce are manually corrected for. No other manual corrections are to made for the purposes of the present invention.

[0146] The polynucleotide variants of the invention may contain alterations in the coding regions, non-coding regions, or both. Especially preferred are polynucleotide variants containing alterations which produce silent substitutions, additions, or deletions, but do not alter the properties or activities of the encoded polypeptide. Nucleotide variants produced by silent substitutions due to the degeneracy of the genetic code are preferred. Moreover, polypeptide variants in which less than 50, less than 40, less than 30, less than 20, less than 10, or 5-50, 5-25, 5-10, 1-5, or 1-2 amino acids are substituted, deleted, or added in any combination are also preferred. Polynucleotide variants can be produced for a variety of reasons, e.g., to optimize codon expression for a particular host (change codons in the human mRNA to those preferred by a bacterial host such as E. coli).

[0147] Naturally occurring variants are called “allelic variants,” and refer to one of several alternate forms of a gene occupying a given locus on a chromosome of an organism. (Genes II, Lewin, B., ed., John Wiley & Sons, New York (1985)). These allelic variants can vary at either the polynucleotide and/or polypeptide level and are included in the present invention. Alternatively, non-naturally occurring variants may be produced by mutagenesis techniques or by direct synthesis.

[0148] Using known methods of protein engineering and recombinant DNA technology, variants may be generated to improve or alter the characteristics of the polypeptides of the present invention. For instance, one or more amino acids can be deleted from the N-terminus or C-terminus of the polypeptide of the present invention without substantial loss of biological function. As an example, Ron et al. (J. Biol. Chem. 268: 2984-2988 (1993)) reported variant KGF proteins having heparin binding activity even after deleting 3, 8, or 27 amino-terminal amino acid residues. Similarly, Interferon gamma exhibited up to ten times higher activity after deleting 8-10 amino acid residues from the carboxy terminus of this protein. (Dobeli et al., J. Biotechnology 7:199-216 (1988).)

[0149] Moreover, ample evidence demonstrates that variants often retain a biological activity similar to that of the naturally occurring protein. For example, Gayle and coworkers (J. Biol. Chem. 268:22105-22111 (1993)) conducted extensive mutational analysis of human cytokine IL-la. They used random mutagenesis to generate over 3,500 individual IL-1a mutants that averaged 2.5 amino acid changes per variant over the entire length of the molecule. Multiple mutations were examined at every possible amino acid position. The investigators found that “[m]ost of the molecule could be altered with little effect on either [binding or biological activity].” In fact, only 23 unique amino acid sequences, out of more than 3,500 nucleotide sequences examined, produced a protein that significantly differed in activity from wild-type.

[0150] Furthermore, even if deleting one or more amino acids from the N-terminus or C-terminus of a polypeptide results in modification or loss of one or more biological functions, other biological activities may still be retained. For example, the ability of a deletion variant to induce and/or to bind antibodies which recognize the secreted form will likely be retained when less than the majority of the residues of the secreted form are removed from the N-terminus or C-terminus. Whether a particular polypeptide lacking N- or C-terminal residues of a protein retains such immunogenic activities can readily be determined by routine methods described herein and otherwise known in the art.

[0151] Thus, the invention further includes polypeptide variants which show a functional activity (e.g., biological activity) of the polypeptides of the invention. Such variants include deletions, insertions, inversions, repeats, and substitutions selected according to general rules known in the art so as have little effect on activity.

[0152] The present application is directed to nucleic acid molecules at least 80%, 85%, 90%, 95%, 96%, 97%, 98%, 99% or 100% identical to the nucleic acid sequences disclosed herein, (e.g., encoding a polypeptide having the amino acid sequence of an N and/or C terminal deletion), irrespective of whether they encode a polypeptide having functional activity. This is because even where a particular nucleic acid molecule does not encode a polypeptide having functional activity, one of skill in the art would still know how to use the nucleic acid molecule, for instance, as a hybridization probe or a polymerase chain reaction (PCR) primer. Uses of the nucleic acid molecules of the present invention that do not encode a polypeptide having functional activity include, inter alia, (1) isolating a gene or allelic or splice variants thereof in a cDNA library; (2) in situ hybridization (e.g., “FISH”) to metaphase chromosomal spreads to provide precise chromosomal location of the gene, as described in Verma et al., Human Chromosomes: A Manual of Basic Techniques, Pergamon Press, New York (1988); (3) Northern Blot analysis for detecting mRNA expression in specific tissues (e.g., normal or diseased tissues); and (4) in situ hybridization (e.g., histochemistry) for detecting mRNA expression in specific tissues (e.g., normal or diseased tissues).

[0153] Preferred, however, are nucleic acid molecules having sequences at least 80%, 85%, 90%, 95%, 96%, 97%, 98%, 99% or 100% identical to the nucleic acid sequences disclosed herein, which do, in fact, encode a polypeptide having functional activity. By a polypeptide having “functional activity” is meant, a polypeptide capable of displaying one or more known functional activities associated with a full-length (complete) protein of the invention. Such functional activities include, but are not limited to, biological activity, antigenicity [ability to bind (or compete with a polypeptide of the invention for binding) to an anti-polypeptide of the invention antibody], immunogenicity (ability to generate antibody which binds to a specific polypeptide of the invention), ability to form multimers with polypeptides of the invention, and ability to bind to a receptor or ligand for a polypeptide of the invention.

[0154] The functional activity of the polypeptides, and fragments, variants and derivatives of the invention, can be assayed by various methods.

[0155] For example, in one embodiment where one is assaying for the ability to bind or compete with a full-length polypeptide of the present invention for binding to an anti-polypetide antibody, various immunoassays known in the art can be used, including but not limited to, competitive and non-competitive assay systems using techniques such as radioimmunoassays, ELISA (enzyme linked immunosorbent assay), “sandwich” immunoassays, immunoradiometric assays, gel diffusion precipitation reactions, immunodiffusion assays, in situ immunoassays (using colloidal gold, enzyme or radioisotope labels, for example), western blots, precipitation reactions, agglutination assays (e.g., gel agglutination assays, hemagglutination assays), complement fixation assays, immunofluorescence assays, protein A assays, and immunoelectrophoresis assays, etc. In one embodiment, antibody binding is detected by detecting a label on the primary antibody. In another embodiment, the primary antibody is detected by detecting binding of a secondary antibody or reagent to the primary antibody. In a further embodiment, the secondary antibody is labeled. Many means are known in the art for detecting binding in an immunoassay and are within the scope of the present invention.

[0156] In another embodiment, where a ligand is identified, or the ability of a polypeptide fragment, variant or derivative of the invention to multimerize is being evaluated, binding can be assayed, e.g., by means well-known in the art, such as, for example, reducing and non-reducing gel chromatography, protein affinity chromatography, and affinity blotting. See generally, Phizicky et al., Microbiol. Rev. 59:94-123 (1995). In another embodiment, the ability of physiological correlates of a polypeptide of the present invention to bind to a substrate(s) of the polypeptide of the invention can be routinely assayed using techniques known in the art.

[0157] In addition, assays described herein (see Examples) and otherwise known in the art may routinely be applied to measure the ability of polypeptides of the present invention and fragments, variants and derivatives thereof to elicit polypeptide related biological activity (either in vitro or in vivo). Other methods will be known to the skilled artisan and are within the scope of the invention.

[0158] Of course, due to the degeneracy of the genetic code, one of ordinary skill in the art will immediately recognize that a large number of the nucleic acid molecules having a sequence at least 80%, 85%, 90%, 95%, 96%, 97%, 98%, 99%, or 100% identical to, for example, the nucleic acid sequence of the cDNA contained in Clone ID NO:Z, the nucleic acid sequence referred to in Table 1A (SEQ ID NO:X), the nucleic acid sequence disclosed in Table 2 (e.g,. the nucleic acid sequence delineated in columns 8 and 9) or fragments thereof, will encode polypeptides “having functional activity.” In fact, since degenerate variants of any of these nucleotide sequences all encode the same polypeptide, in many instances, this will be clear to the skilled artisan even without performing the above described comparison assay. It will be further recognized in the art that, for such nucleic acid molecules that are not degenerate variants, a reasonable number will also encode a polypeptide having functional activity. This is because the skilled artisan is fully aware of amino acid substitutions that are either less likely or not likely to significantly effect protein function (e.g., replacing one aliphatic amino acid with a second aliphatic amino acid), as further described below.

[0159] For example, guidance concerning how to make phenotypically silent amino acid substitutions is provided in Bowie et al., “Deciphering the Message in Protein Sequences: Tolerance to Amino Acid Substitutions,” Science 247:1306-1310 (1990), wherein the authors indicate that there are two main strategies for studying the tolerance of an amino acid sequence to change.

[0160] The first strategy exploits the tolerance of amino acid substitutions by natural selection during the process of evolution. By comparing amino acid sequences in different species, conserved amino acids can be identified. These conserved amino acids are likely important for protein function. In contrast, the amino acid positions where substitutions have been tolerated by natural selection indicates that these positions are not critical for protein function. Thus, positions tolerating amino acid substitution could be modified while still maintaining biological activity of the protein.

[0161] The second strategy uses genetic engineering to introduce amino acid changes at specific positions of a cloned gene to identify regions critical for protein function. For example, site directed mutagenesis or alanine-scanning mutagenesis (introduction of single alanine mutations at every residue in the molecule) can be used. See Cunningham and Wells, Science 244:1081-1085 (1989). The resulting mutant molecules can then be tested for biological activity.

[0162] As the authors state, these two strategies have revealed that proteins are surprisingly tolerant of amino acid substitutions. The authors further indicate which amino acid changes are likely to be permissive at certain amino acid positions in the protein. For example, most buried (within the tertiary structure of the protein) amino acid residues require nonpolar side chains, whereas few features of surface side chains are generally conserved. Moreover, tolerated conservative amino acid substitutions involve replacement of the aliphatic or hydrophobic amino acids Ala, Val, Leu and Ile; replacement of the hydroxyl residues Ser and Thr; replacement of the acidic residues Asp and Glu; replacement of the amide residues Asn and Gln, replacement of the basic residues Lys, Arg, and His; replacement of the aromatic residues Phe, Tyr, and Trp, and replacement of the small-sized amino acids Ala, Ser, Thr, Met, and Gly. Besides conservative amino acid substitution, variants of the present invention include (i) substitutions with one or more of the non-conserved amino acid residues, where the substituted amino acid residues may or may not be one encoded by the genetic code, or (ii) substitutions with one or more of the amino acid residues having a substituent group, or (iii) fusion of the mature polypeptide with another compound, such as a compound to increase the stability and/or solubility of the polypeptide (for example, polyethylene glycol), (iv) fusion of the polypeptide with additional amino acids, such as, for example, an IgG Fc fusion region peptide, serum albumin (preferably human serum albumin) or a fragment thereof, or leader or secretory sequence, or a sequence facilitating purification, or (v) fusion of the polypeptide with another compound, such as albumin (including but not limited to recombinant albumin (see, e.g., U.S. Pat. No. 5,876,969, issued Mar. 2, 1999, EP Patent 0 413 622, and U.S. Pat. No. 5,766,883, issued Jun. 16, 1998, herein incorporated by reference in their entirety)). Such variant polypeptides are deemed to be within the scope of those skilled in the art from the teachings herein.

[0163] For example, polypeptide variants containing amino acid substitutions of charged amino acids with other charged or neutral amino acids may produce proteins with improved characteristics, such as less aggregation. Aggregation of pharmaceutical formulations both reduces activity and increases clearance due to the aggregate's immunogenic activity. See Pinckard et al., Clin. Exp. Immunol. 2:331-340 (1967); Robbins et al., Diabetes 36: 838-845 (1987); Cleland et al., Crit. Rev. Therapeutic Drug Carrier Systems 10:307-377 (1993).

[0164] A further embodiment of the invention relates to polypeptides which comprise the amino acid sequence of a polypeptide having an amino acid sequence which contains at least one amino acid substitution, but not more than 50 amino acid substitutions, even more preferably, not more than 40 amino acid substitutions, still more preferably, not more than 30 amino acid substitutions, and still even more preferably, not more than 20 amino acid substitutions from a polypeptide sequence disclosed herein. Of course it is highly preferable for a polypeptide to have an amino acid sequence which comprises the amino acid sequence of a polypeptide of SEQ ID NO:Y, an amino acid sequence encoded by SEQ ID NO:X, an amino acid sequence encoded by the portion of SEQ ID NO:X as defined in columnns 8 and 9 of Table 2, an amino acid sequence encoded by the complement of SEQ ID NO:X, and/or an amino acid sequence encoded by cDNA contained in Clone ID NO:Z which contains, in order of ever-increasing preference, at least one, but not more than 10, 9, 8, 7, 6, 5, 4, 3, 2 or 1 amino acid substitutions.

[0165] In specific embodiments, the polypeptides of the invention comprise, or alternatively, consist of, fragments or variants of a reference amino acid sequence selected from: (a) the amino acid sequence of SEQ ID NO:Y or fragments thereof (e.g., the mature form and/or other fragments described herein); (b) the amino acid sequence encoded by SEQ ID NO:X or fragments thereof; (c) the amino acid sequence encoded by the complement of SEQ ID NO:X or fragments thereof; (d) the amino acid sequence encoded by the portion of SEQ ID NO:X as defined in columns 8 and 9 of Table 2 or fragments thereof; and (e) the amino acid sequence encoded by cDNA contained in Clone ID NO:Z or fragments thereof; wherein the fragments or variants have 1-5, 5-10, 5-25, 5-50, 10⁻⁵⁰ or 50-150, amino acid residue additions, substitutions, and/or deletions when compared to the reference amino acid sequence. In preferred embodiments, the amino acid substitutions are conservative. Polynucleotides encoding these polypeptides are also encompassed by the invention.

[0166] Polynucleotide and Polypeptide Fragments

[0167] The present invention is also directed to polynucleotide fragments of the polynucleotides (nucleic acids) of the invention. In the present invention, a “polynucleotide fragment” refers to a polynucleotide having a nucleic acid sequence which, for example: is a portion of the cDNA contained in Clone ID NO:Z or the complementary strand thereto; is a portion of the polynucleotide sequence encoding the polypeptide encoded by the cDNA contained in Clone ID NO:Z or the complementary strand thereto; is a portion of a polynucleotide sequence encoding the amino acid sequence encoded by the region of SEQ ID NO:X as defined in columns 8 and 9 of Table 2 or the complementary strand thereto; is a portion of the polynucleotide sequence of SEQ ID NO:X as defined in columns 8 and 9 of Table 2 or the complementary strand thereto; is a portion of the polynucleotide sequence in SEQ ID NO:X or the complementary strand thereto; is a polynucleotide sequence encoding a portion of the polypeptide of SEQ ID NO:Y; is a polynucleotide sequence encoding a portion of a polypeptide encoded by SEQ ID NO:X; is a polynucleotide sequence encoding a portion of a polypeptide encoded by the complement of the polynucleotide sequence in SEQ ID NO:X; is a portion of a polynucleotide sequence encoding the amino acid sequence encoded by the region of SEQ ID NO:B as defined in column 6 of Table 1B or the complementary strand thereto; or is a portion of the polynucleotide sequence of SEQ ID NO:B as defined in column 6 of Table 1B or the complementary strand thereto.

[0168] The polynucleotide fragments of the invention are preferably at least about 15 nt, and more preferably at least about 20 nt, still more preferably at least about 30 nt, and even more preferably, at least about 40 nt, at least about 50 nt, at least about 75 nt, or at least about 150 nt in length. A fragment “at least 20 nt in length,” for example, is intended to include 20 or more contiguous bases from the cDNA sequence contained in Clone ID NO:Z, or the nucleotide sequence shown in SEQ ID NO:X or the complementary stand thereto. In this context “about” includes the particularly recited value or a value larger or smaller by several (5, 4, 3, 2, or 1) nucleotides, at either terminus or at both termini. These nucleotide fragments have uses that include, but are not limited to, as diagnostic probes and primers as discussed herein. Of course, larger fragments (e.g., at least 160, 170, 180, 190, 200, 250, 500, 600, 1000, or 2000 nucleotides in length) are also encompassed by the invention.

[0169] Moreover, representative examples of polynucleotide fragments of the invention comprise, or alternatively consist of, a sequence from about nucleotide number 1-50, 51-100, 101-150, 151-200, 201-250, 251-300, 301-350, 351-400, 401-450, 451-500, 501-550, 551-600, 601-650, 651-700, 701-750, 751-800, 801-850, 851-900, 901-950, 951-1000, 1001-1050, 1051-1100, 1101-1150, 1151-1200, 1201-1250, 1251-1300, 1301-1350, 1351-1400, 1401-1450, 1451-1500, 1501-1550, 1551-1600, 1601-1650, 1651-1700, 1701-1750, 1751-1800, 1801-1850, 1851-1900, 1901-1950, 1951-2000, 2001-2050, 2051-2100, 2101-2150, 2151-2200, 2201-2250, 2251-2300, 2301-2350, 2351-2400, 2401-2450, 2451-2500, 2501-2550, 2551-2600, 2601-2650, 2651-2700, 2701-2750, 2751-2800, 2801-2850, 2851-2900, 2901-2950, 2951-3000, 3001-3050, 3051-3100, 3101-3150, 3151-3200, 3201-3250, 3251-3300, 3301-3350, 3351-3400, 3401-3450, 3451-3500, 3501-3550, 3551-3600, 3601-3650, 3651-3700, 3701-3750, 3751-3800, 3801-3850, 3851-3900, 3901-3950, 3951-4000, 4001-4050, 4051-4100, 4101-4150, 4151-4200, 4201-4250, 4251-4300, 4301-4350, 4351-4400, 4401-4450, 4451-4500, 4501-4550, 4551-4600, 4601-4650, 4651-4700, 4701-4750, 4751-4800, 4801-4850, 4851-4900, 4901-4950, 4951-5000, 5001-5050, 5051-5100, 5101-5150, 5151-5200, 5201-5250, 5251-5300, 5301-5350, 5351-5400, 5401-5450, 5451-5500, 5501-5550, 5551-5600, 5601-5650, 5651-5700, 5701-5750, 5751-5800, 5801-5850, 5851-5900, 5901-5950, 5951-6000, 6001-6050, 6051-6100, 6101-6150, 6151-6200, 6201-6250, 6251-6300, 6301-6350, 6351-6400, 6401-6450, 6451-6500, 6501-6550, 6551-6600, 6601-6650, 6651-6700, 6701-6750, 6751-6800, 6801-6850, 6851-6900, 6901-6950, 6951-7000, 7001-7050, 7051-7100, 7101-7150, 7151-7200, 7201-7250, 7251-7300 or 7301 to the end of SEQ ID NO:X, or the complementary strand thereto. In this context “about” includes the particularly recited range or a range larger or smaller by several (5, 4, 3, 2, or 1) nucleotides, at either terminus or at both termini. Preferably, these fragments encode a polypeptide which has a functional activity (e.g., biological activity). More preferably, these polynucleotides can be used as probes or primers as discussed herein. Polynucleotides which hybridize to one or more of these polynucleotides under stringent hybridization conditions or alternatively, under lower stringency conditions are also encompassed by the invention, as are polypeptides encoded by these polynucleotides.

[0170] Further representative examples of polynucleotide fragments of the invention comprise, or alternatively consist of, a sequence from about nucleotide number 1-50, 51-100, 101-150, 151-200, 201-250, 251-300, 301-350, 351-400, 401-450, 451-500, 501-550, 551-600, 601-650, 651-700, 701-750, 751-800, 801-850, 851-900, 901-950, 951-1000, 1001-1050, 1051-1100, 1101-1150, 1151-1200, 1201-1250, 1251-1300, 1301-1350, 1351-1400, 1401-1450, 1451-1500, 1501-1550, 1551-1600, 1601-1650, 1651-1700, 1701-1750, 1751-1800, 1801-1850, 1851-1900, 1901-1950, 1951-2000, 2001-2050, 2051-2100, 2101-2150, 2151-2200, 2201-2250, 2251-2300, 2301-2350, 2351-2400, 2401-2450, 2451-2500, 2501-2550, 2551-2600, 2601-2650, 2651-2700, 2701-2750, 2751-2800, 2801-2850, 2851-2900, 2901-2950, 2951-3000, 3001-3050, 3051-3100, 3101-3150, 3151-3200, 3201-3250, 3251-3300, 3301-3350, 3351-3400, 3401-3450, 3451-3500, 3501-3550, 3551-3600, 3601-3650, 3651-3700, 3701-3750, 3751-3800, 3801-3850, 3851-3900, 3901-3950, 3951-4000, 4001-4050, 4051-4100, 4101-4150, 4151-4200, 4201-4250, 4251-4300, 4301-4350, 4351-4400, 4401-4450, 4451-4500, 4501-4550, 4551-4600, 4601-4650, 4651-4700, 4701-4750, 4751-4800, 4801-4850, 4851-4900, 4901-4950, 4951-5000, 5001-5050, 5051-5100, 5101-5150, 5151-5200, 5201-5250, 5251-5300, 5301-5350, 5351-5400, 5401-5450, 5451-5500, 5501-5550, 5551-5600, 5601-5650, 5651-5700, 5701-5750, 5751-5800, 5801-5850, 5851-5900, 5901-5950, 5951-6000, 6001-6050, 6051-6100, 6101-6150, 6151-6200, 6201-6250, 6251-6300, 6301-6350, 6351-6400, 6401-6450, 6451-6500, 6501-6550, 6551-6600, 6601-6650, 6651-6700, 6701-6750, 6751-6800, 6801-6850, 6851-6900, 6901-6950, 6951-7000, 7001-7050, 7051-7100, 7101-7150, 7151-7200, 7201-7250, 7251-7300 or 7301 to the end of the cDNA sequence contained in Clone ID NO:Z, or the complementary strand thereto. In this context “about” includes the particularly recited range or a range larger or smaller by several (5, 4, 3, 2, or 1) nucleotides, at either terminus or at both termini. Preferably, these fragments encode a polypeptide which has a functional activity (e.g., biological activity). More preferably, these polynucleotides can be used as probes or primers as discussed herein. Polynucleotides which hybridize to one or more of these polynucleotides under stringent hybridization conditions or alternatively, under lower stringency conditions are also encompassed by the invention, as are polypeptides encoded by these polynucleotides.

[0171] Moreover, representative examples of polynucleotide fragments of the invention comprise, or alternatively consist of, a nucleic acid sequence comprising one, two, three, four, five, six, seven, eight, nine, ten, or more of the above described polynucleotide fragments of the invention in combination with a polynucleotide sequence delineated in Table 1B column 6. Additional, representative examples of polynucleotide fragments of the invention comprise, or alternatively consist of, a nucleic acid sequence comprising one, two, three, four, five, six, seven, eight, nine, ten, or more of the above described polynucleotide fragments of the invention in combination with a polynucleotide sequence that is the complementary strand of a sequence delineated in column 6 of Table 1B. In further embodiments, the above-described polynucleotide fragments of the invention comprise, or alternatively consist of, sequences delineated in Table 1B, column 6, and have a nucleic acid sequence which is different from that of the BAC fragment having the sequence disclosed in SEQ ID NO:B (see Table 1B, column 5). In additional embodiments, the above-described polynucleotide fragments of the invention comprise, or alternatively consist of, sequences delineated in Table 1B, column 6, and have a nucleic acid sequence which is different from that published for the BAC clone identified as BAC ID NO:A (see Table 1B, column 4). In additional embodiments, the above-described polynucleotides of the invention comprise, or alternatively consist of, sequences delineated Table 1B, column 6, and have a nucleic acid sequence which is different from that contained in the BAC clone identified as BAC ID NO:A (see Table 1B, column 4). Polypeptides encoded by these polynucleotides, other polynucleotides that encode these polypeptides, and antibodies that bind these polypeptides are also encompassed by the invention. Additionally, fragments and variants of the above-described polynucleotides and polypeptides are also encompassed by the invention.

[0172] In additional specific embodiments, polynucleotides of the invention comprise, or alternatively consist of, one, two, three, four, five, six, seven, eight, nine, ten, or more fragments of the sequences delineated in column 6 of Table 1B, and the polynucleotide sequence of SEQ ID NO:X (e.g., as defined in Table 1B, column 2) or fragments or variants thereof. Polypeptides encoded by these polynucleotides, other polynucleotides that encode these polypeptides, and antibodies that bind these polypeptides are also encompassed by the invention.

[0173] In additional specific embodiments, polynucleotides of the invention comprise, or alternatively consist of, one, two, three, four, five, six, seven, eight, nine, ten, or more fragments of the sequences delineated in column 6 of Table 1B which correspond to the same Clone ID NO:Z (see Table 1B, column 1), and the polynucleotide sequence of SEQ ID NO:X (e.g., as defined in Table 1A or IB) or fragments or variants thereof. Polypeptides encoded by these polynucleotides, other polynucleotides that encode these polypeptides, and antibodies that bind these polypeptides are also encompassed by the invention.

[0174] In further specific embodiments, polynucleotides of the invention comprise, or alternatively consist of, one, two, three, four, five, six, seven, eight, nine, ten, or more fragments of the sequences delineated in the same row of column 6 of Table 1B, and the polynucleotide sequence of SEQ ID NO:X (e.g., as defined in Table 1A or 1B) or fragments or variants thereof. Polypeptides encoded by these polynucleotides, other polynucleotides that encode these polypeptides, and antibodies that bind these polypeptides are also encompassed by the invention.

[0175] In additional specific embodiments, polynucleotides of the invention comprise, or alternatively consist of a polynucleotide sequence in which the 3′ 10 polynucleotides of one of the sequences delineated in column 6 of Table 1B and the 5′ 10 polynucleotides of the sequence of SEQ ID NO:X are directly contiguous. Nucleic acids which hybridize to the complement of these 20 contiguous polynucleotides under stringent hybridization conditions or alternatively, under lower stringency conditions, are also encompassed by the invention. Polypeptides encoded by these polynucleotides and/or nucleic acids, other polynucleotides and/or nucleic acids that encode these polypeptides, and antibodies that bind these polypeptides are also encompassed by the invention. Additionally, fragments and variants of the above-described polynucleotides, nucleic acids, and polypeptides are also encompassed by the invention.

[0176] In additional specific embodiments, polynucleotides of the invention comprise, or alternatively consist of a polynucleotide sequence in which the 3′ 10 polynucleotides of one of the sequences delineated in column 6 of Table 1B and the 5′ 10 polynucleotides of a fragment or variant of the sequence of SEQ ID NO:X (e.g., as described herein) are directly contiguous Nucleic acids which hybridize to the complement of these 20 contiguous polynucleotides under stringent hybridization conditions or alternatively, under lower stringency conditions, are also encompassed by the invention. Polypeptides encoded by these polynucleotides and/or nucleic acids, other polynucleotides and/or nucleic acids encoding these polypeptides, and antibodies that bind these polypeptides are also encompassed by the invention. Additionally, fragments and variants of the above-described polynucleotides, nucleic acids, and polypeptides are also encompassed by the invention.

[0177] In further specific embodiments, polynucleotides of the invention comprise, or alternatively consist of a polynucleotide sequence in which the 3′ 10 polynucleotides of a fragment or variant of the sequence of SEQ ID NO:X and the 5′ 10 polynucleotides of the sequence of one of the sequences delineated in column 6 of Table 1B are directly contiguous. Nucleic acids which hybridize to the complement of these 20 contiguous polynucleotides under stringent hybridization conditions or alternatively, under lower stringency conditions, are also encompassed by the invention. Polypeptides encoded by these polynucleotides and/or nucleic acids, other polynucleotides and/or nucleic acids encoding these polypeptides, and antibodies that bind these polypeptides are also encompassed by the invention. Additionally, fragments and variants of the above-described polynucleotides, nucleic acids, and polypeptides are also encompassed by the invention.

[0178] In specific embodiments, polynucleotides of the invention comprise, or alternatively consist of a polynucleotide sequence in which the 3′ 10 polynucleotides of one of the sequences delineated in column 6 of Table 1B and the 5′ 10 polynucleotides of another sequence in column 6 are directly contiguous. In preferred embodiments, the 3′ 10 polynucleotides of one of the sequences delineated in column 6 of Table 1B is directly contiguous with the 5′ 10 polynucleotides of the next sequential exon delineated in Table 1B, column 6. Nucleic acids which hybridize to the complement of these 20 contiguous polynucleotides under stringent hybridization conditions or alternatively, under lower stringency conditions, are also encompassed by the invention. Polypeptides encoded by these polynucleotides and/or nucleic acids, other polynucleotides and/or nucleic acids encoding these polypeptides, and antibodies that bind these polypeptides are also encompassed by the invention. Additionally, fragments and variants of the above-described polynucleotides, nucleic acids, and polypeptides are also encompassed by the invention.

[0179] In the present invention, a “polypeptide fragment” refers to an amino acid sequence which is a portion of that contained in SEQ ID NO:Y, a portion of an amino acid sequence encoded by the portion of SEQ ID NO:X as defined in columnns 8 and 9 of Table 2, a portion of an amino acid sequence encoded by the polynucleotide sequence of SEQ ID NO:X, a portion of an amino acid sequence encoded by the complement of the polynucleotide sequence in SEQ ID NO:X, and/or a portion of an amino acid sequence encoded by the cDNA contained in Clone ID NO:Z. Protein (polypeptide) fragments may be “free-standing,” or comprised within a larger polypeptide of which the fragment forms a part or region, most preferably as a single continuous region. Representative examples of polypeptide fragments of the invention, include, for example, fragments comprising, or alternatively consisting of, from about amino acid number 1-20, 21-40, 41-60, 61-80, 81-100, 101-120, 121-140, 141-160, 161-180, 181-200, 201-220, 221-240, 241-260, 261-280, 281-300, 301-320, 321-340, 341-360, 361-380, 381-400, 401-420, 421-440, 441-460, 461-480, 481-500, 501-520, 521-540, 541-560, 561-580, 581-600, 601-620, 621-640, 641-660, 661-680, 681-700, 701-720, 721-740, 741-760, 761-780, 781-800, 801-820, 821-840, 841-860, 861-880, 881-900, 901-920, 921-940, 941-960, 961-980, 981-1000, 1001-1020, 1021-1040, 1041-1060, 1061-1080, 1081-1100, 1101-1120, 1121-1140, 1141-1160, 1161-1180, 1181-1200, 1201-1220, 1221-1240, 1241-1260, 1261-1280, 1281-1300, 1301-1320, 1321-1340, 1341-1360, 1361-1380, 1381-1400, 1401-1420, 1421-1440, or 1441 to the end of the coding region of cDNA and SEQ ID NO: Y. In a preferred embodiment, polypeptide fragments of the invention include, for example, fragments comprising, or alternatively consisting of, from about amino acid number 1-20, 21-40, 41-60, 61-80, 81-100, 101-120, 121-140, 141-160, 161-180, 181-200, 201-220, 221-240, 241-260, 261-280, 281-300, 301-320, 321-340, 341-360, 361-380, 381-400, 401-420, 421-440, 441-460, 461-480, 481-500, 501-520, 521-540, 541-560, 561-580, 581-600, 601-620, 621-640, 641-660, 661-680, 681-700, 701-720, 721-740, 741-760, 761-780, 781-800, 801-820, 821-840, 841-860, 861-880, 881-900, 901-920, 921-940, 941-960, 961-980, 981-1000, 1001-1020, 1021-1040, 1041-1060, 1061-1080, 1081-1100, 1101-1120, 1121-1140, 1141-1160, 1161-1180, 1181-1200, 1201-1220, 1221-1240, 1241-1260, 1261-1280, 1281-1300, 1301-1320, 1321-1340, 1341-1360, 1361-1380, 1381-1400, 1401-1420, 1421-1440, or 1441 to the end of the coding region of SEQ ID NO:Y. Moreover, polypeptide fragments of the invention may be at least about 10, 15, 20, 25, 30, 35, 40, 45, 50, 55, 60, 65, 70, 75, 80, 85, 90, 100, 110, 120, 130, 140, or 150 amino acids in length. In this context “about” includes the particularly recited ranges or values, or ranges or values larger or smaller by several (5, 4, 3, 2, or 1) amino acids, at either extreme or at both extremes. Polynucleotides encoding these polypeptide fragments are also encompassed by the invention.

[0180] Even if deletion of one or more amino acids from the N-terminus of a protein results in modification of loss of one or more biological functions of the protein, other functional activities (e.g., biological activities, ability to multimerize, ability to bind a ligand) may still be retained. For example, the ability of shortened muteins to induce and/or bind to antibodies which recognize the complete or mature forms of the polypeptides generally will be retained when less than the majority of the residues of the complete or mature polypeptide are removed from the N-terminus. Whether a particular polypeptide lacking N-terminal residues of a complete polypeptide retains such immunologic activities can readily be determined by routine methods described herein and otherwise known in the art. It is not unlikely that a mutein with a large number of deleted N-terminal amino acid residues may retain some biological or immunogenic activities. In fact, peptides composed of as few as six amino acid residues may often evoke an immune response.

[0181] Accordingly, polypeptide fragments include the secreted protein as well as the mature form. Further preferred polypeptide fragments include the secreted protein or the mature form having a continuous series of deleted residues from the amino or the carboxy terminus, or both. For example, any number of amino acids, ranging from 1-60, can be deleted from the amino terminus of either the secreted polypeptide or the mature form. Similarly, any number of amino acids, ranging from 1-30, can be deleted from the carboxy terminus of the secreted protein or mature form. Furthermore, any combination of the above amino and carboxy terminus deletions are preferred. Similarly, polynucleotides encoding these polypeptide fragments are also preferred.

[0182] The present invention further provides polypeptides having one or more residues deleted from the amino terminus of the amino acid sequence of a polypeptide disclosed herein (e.g., a polypeptide of SEQ ID NO:Y, a polypeptide encoded by the polynucleotide sequence contained in SEQ ID NO:X or the complement thereof, a polypeptide encoded by the portion of SEQ ID NO:X as defined in columns 8 and 9 of Table 2, a polypeptide encoded by the portion of SEQ ID NO:B as defined in column 6 of Table 1B, and/or a polypeptide encoded by the cDNA contained in Clone ID NO:Z). In particular, N-terminal deletions may be described by the general formula m-q, where q is a whole integer representing the total number of amino acid residues in a polypeptide of the invention (e.g., the polypeptide disclosed in SEQ ID NO:Y, or the polypeptide encoded by the portion of SEQ ID NO:X as defined in columns 8 and 9 of Table 2), and m is defined as any integer ranging from 2 to q-6. Polynucleotides encoding these polypeptides are also encompassed by the invention.

[0183] The present invention further provides polypeptides having one or more residues from the carboxy terminus of the amino acid sequence of a polypeptide disclosed herein (e.g., a polypeptide of SEQ ID NO:Y, a polypeptide encoded by the polynucleotide sequence contained in SEQ ID NO:X, a polypeptide encoded by the portion of SEQ ID NO:X as defined in columns 8 and 9 of Table 2, and/or a polypeptide encoded by the cDNA contained in Clone ID NO:Z). In particular, C-terminal deletions may be described by the general formula 1-n, where n is any whole integer ranging from 6 to q-l, and where n corresponds to the position of amino acid residue in a polypeptide of the invention. Polynucleotides encoding these polypeptides are also encompassed by the invention.

[0184] In addition, any of the above described N- or C-terminal deletions can be combined to produce a N- and C-terninal deleted polypeptide. The invention also provides polypeptides having one or more amino acids deleted from both the amino and the carboxyl termini, which may be described generally as having residues m-n of a polypeptide encoded by SEQ ID NO:X (e.g., including, but not limited to, the preferred polypeptide disclosed as SEQ ID NO:Y and the polypeptide encoded by the portion of SEQ ID NO:X as defined in columns 8 and 9 of Table 2), the cDNA contained in Clone ID NO:Z, and/or the complement thereof, where n and m are integers as described above. Polynucleotides encoding these polypeptides are also encompassed by the invention.

[0185] Also as mentioned above, even if deletion of one or more amino acids from the C-terminus of a protein results in modification of loss of one or more biological functions of the protein, other functional activities (e.g., biological activities, ability to multimerize, ability to bind a ligand) may still be retained. For example the ability of the shortened mutein to induce and/or bind to antibodies which recognize the complete or mature forms of the polypeptide generally will be retained when less than the majority of the residues of the complete or mature polypeptide are removed from the C-terminus. Whether a particular polypeptide lacking C-terminal residues of a complete polypeptide retains such immunologic activities can readily be determined by routine methods described herein and otherwise known in the art. It is not unlikely that a mutein with a large number of deleted C-terminal amino acid residues may retain some biological or immunogenic activities. In fact, peptides composed of as few as six amino acid residues may often evoke an immune response.

[0186] The present application is also directed to proteins containing polypeptides at least 80%, 85%, 90%, 95%, 96%, 97%, 98% or 99% identical to a polypeptide sequence set forth herein. In preferred embodiments, the application is directed to proteins containing polypeptides at least 80%, 85%, 90%, 95%, 96%, 97%, 98% or 99% identical to polypeptides having the amino acid sequence of the specific N- and C-terminal deletions. Polynucleotides encoding these polypeptides are also encompassed by the invention.

[0187] Any polypeptide sequence encoded by, for example, the polynucleotide sequences set forth as SEQ ID NO:X or the complement thereof, (presented, for example, in Tables 1A and 2), the cDNA contained in Clone ID NO:Z, or the polynucleotide sequence as defined in column 6 of Table 1B, may be analyzed to determine certain preferred regions of the polypeptide. For example, the amino acid sequence of a polypeptide encoded by a polynucleotide sequence of SEQ ID NO:X (e.g., the polypeptide of SEQ ID NO:Y and the polypeptide encoded by the portion of SEQ ID NO:X as defined in columnns 8 and 9 of Table 2) or the cDNA contained in Clone ID NO:Z may be analyzed using the default parameters of the DNASTAR computer algorithm (DNASTAR, Inc., 1228 S. Park St., Madison, WI 53715 USA; http://www.dnastar.com/).

[0188] Polypeptide regions that may be routinely obtained using the DNASTAR computer algorithm include, but are not limited to, Garnier-Robson alpha-regions, beta-regions, turn-regions, and coil-regions; Chou-Fasman alpha-regions, beta-regions, and turn-regions; Kyte-Doolittle hydrophilic regions and hydrophobic regions; Eisenberg alpha- and beta-amphipathic regions; Karplus-Schulz flexible regions; Emini surface-forming regions; and Jameson-Wolf regions of high antigenic index. Among highly preferred polynucleotides of the invention in this regard are those that encode polypeptides comprising regions that combine several structural features, such as several (e.g., 1, 2, 3 or 4) of the features set out above.

[0189] Additionally, Kyte-Doolittle hydrophilic regions and hydrophobic regions, Emini surface-forming regions, and Jameson-Wolf regions of high antigenic index (i.e., containing four or more contiguous amino acids having an antigenic index of greater than or equal to 1.5, as identified using the default parameters of the Jameson-Wolf program) can routinely be used to determine polypeptide regions that exhibit a high degree of potential for antigenicity. Regions of high antigenicity are determined from data by DNASTAR analysis by choosing values which represent regions of the polypeptide which are likely to be exposed on the surface of the polypeptide in an environment in which antigen recognition may occur in the process of initiation of an immune response.

[0190] Preferred polypeptide fragments of the invention are fragments comprising, or alternatively, consisting of, an amino acid sequence that displays a functional activity (e.g. biological activity) of the polypeptide sequence of which the amino acid sequence is a fragment. By a polypeptide displaying a “functional activity” is meant a polypeptide capable of one or more known functional activities associated with a full-length protein, such as, for example, biological activity, antigenicity, immunogenicity, and/or multimerization, as described herein.

[0191] Other preferred polypeptide fragments are biologically active fragments. Biologically active fragments are those exhibiting activity similar, but not necessarily identical, to an activity of the polypeptide of the present invention. The biological activity of the fragments may include an improved desired activity, or a decreased undesirable activity.

[0192] In preferred embodiments, polypeptides of the invention comprise, or alternatively consist of, one, two, three, four, five or more of the antigenic fragments of the polypeptide of SEQ ID NO:Y, or portions thereof. Polynucleotides encoding these polypeptides are also encompassed by the invention.

[0193] The present invention encompasses polypeptides comprising, or alternatively consisting of, an epitope of: the polypeptide sequence shown in SEQ ID NO:Y; a polypeptide sequence encoded by SEQ ID NO:X or the complementary strand thereto; the polypeptide sequence encoded by the portion of SEQ ID NO:X as defined in columns 8 and 9 of Table 2; the polypeptide sequence encoded by the portion of SEQ ID NO:B as defined in column 6 of Table 1B or the complement thereto; the polypeptide sequence encoded by the cDNA contained in Clone ID NO:Z; or the polypeptide sequence encoded by a polynucleotide that hybridizes to the sequence of SEQ ID NO:X, the complement of the sequence of SEQ ID NO:X, the complement of a portion of SEQ ID NO:X as defined in columns 8 and 9 of Table 2, or the cDNA sequence contained in Clone ID NO:Z under stringent hybridization conditions or alternatively, under lower stringency hybridization as defined supra. The present invention further encompasses polynucleotide sequences encoding an epitope of a polypeptide sequence of the invention (such as, for example, the sequence disclosed in SEQ ID NO:X, or a fragment thereof), polynucleotide sequences of the complementary strand of a polynucleotide sequence encoding an epitope of the invention, and polynucleotide sequences which hybridize to the complementary strand under stringent hybridization conditions or alternatively, under lower stringency hybridization conditions defined supra.

[0194] The term “epitopes,” as used herein, refers to portions of a polypeptide having antigenic or immunogenic activity in an animal, preferably a mammal, and most preferably in a human. In a preferred embodiment, the present invention encompasses a polypeptide comprising an epitope, as well as the polynucleotide encoding this polypeptide. An “immunogenic epitope,” as used herein, is defined as a portion of a protein that elicits an antibody response in an animal, as determined by any method known in the art, for example, by the methods for generating antibodies described infra. (See, for example, Geysen et al., Proc. Natl. Acad. Sci. USA 81:3998-4002 (1983)). The term “antigenic epitope,” as used herein, is defined as a portion of a protein to which an antibody can immunospecifically bind its antigen as determined by any method well known in the art, for example, by the immunoassays described herein. Immunospecific binding excludes non-specific binding but does not necessarily exclude cross-reactivity with other antigens. Antigenic epitopes need not necessarily be immunogenic.

[0195] Fragments which function as epitopes may be produced by any conventional means. (See, e.g., Houghten, R. A., Proc. Natl. Acad. Sci. USA 82:5131-5135 (1985) further described in U.S. Pat. No. 4,631,211.)

[0196] In the present invention, antigenic epitopes preferably contain a sequence of at least 4, at least 5, at least 6, at least 7, more preferably at least 8, at least 9, at least 10, at least 11, at least 12, at least 13, at least 14, at least 15, at least 20, at least 25, at least 30, at least 40, at least 50, and, most preferably, between about 15 to about 30 amino acids. Preferred polypeptides comprising immunogenic or antigenic epitopes are at least 10, 15, 20, 25, 30, 35, 40, 45, 50, 55, 60, 65, 70, 75, 80, 85, 90, 95, or 100 amino acid residues in length. Additional non-exclusive preferred antigenic epitopes include the antigenic epitopes disclosed herein, as well as portions thereof. Antigenic epitopes are useful, for example, to raise antibodies, including monoclonal antibodies, that specifically bind the epitope. Preferred antigenic epitopes include the antigenic epitopes disclosed herein, as well as any combination of two, three, four, five or more of these antigenic epitopes. Antigenic epitopes can be used as the target molecules in immunoassays. (See, for instance, Wilson et al., Cell 37:767-778 (1984); Sutcliffe et al., Science 219:660-666 (1983)).

[0197] Non-limiting examples of epitopes of polypeptides that can be used to generate antibodies of the invention include a polypeptide comprising, or alternatively consisting of, at least one, two, three, four, five, six or more of the portion(s) of SEQ ID NO:Y specified in column 7 of Table 1A. These polypeptide fragments have been determined to bear antigenic epitopes of the proteins of the invention by the analysis of the Jameson-Wolf antigenic index which is included in the DNAStar suite of computer programs. By “comprise” it is intended that a polypeptide contains at least one, two, three, four, five, six or more of the portion(s) of SEQ ID NO:Y shown in column 7 of Table 1A, but it may contain additional flanking residues on either the amino or carboxyl termini of the recited portion. Such additional flanking sequences are preferably sequences naturally found adjacent to the portion; i.e., contiguous sequence shown in SEQ ID NO:Y. The flanking sequence may, however, be sequences from a heterolgous polypeptide, such as from another protein described herein or from a heterologous polypeptide not described herein. In particular embodiments, epitope portions of a polypeptide of the invention comprise one, two, three, or more of the portions of SEQ ID NO:Y shown in column 7 of Table 1A.

[0198] Similarly, immunogenic epitopes can be used, for example, to induce antibodies according to methods well known in the art. See, for instance, Sutcliffe et al., supra; Wilson et al., supra; Chow et al., Proc. Natl. Acad. Sci. USA 82:910⁻⁹¹⁴; and Bittle et al., J. Gen. Virol. 66:2347-2354 (1985). Preferred immunogenic epitopes include the immunogenic epitopes disclosed herein, as well as any combination of two, three, four, five or more of these immunogenic epitopes. The polypeptides comprising one or more immunogenic epitopes may be presented for eliciting an antibody response together with a carrier protein, such as an albumin, to an animal system (such as rabbit or mouse), or, if the polypeptide is of sufficient length (at least about 25 amino acids), the polypeptide may be presented without a carrier. However, immunogenic epitopes comprising as few as 8 to 10 amino acids have been shown to be sufficient to raise antibodies capable of binding to, at the very least, linear epitopes in a denatured polypeptide (e.g., in Western blotting).

[0199] Epitope-bearing polypeptides of the present invention may be used to induce antibodies according to methods well known in the art including, but not limited to, in vivo immunization, in vitro immunization, and phage display methods. See, e.g., Sutcliffe et al., supra; Wilson et al., supra, and Bittle et al., J. Gen. Virol., 66:2347-2354 (1985). If in vivo immunization is used, animals may be immunized with free peptide; however, anti-peptide antibody titer may be boosted by coupling the peptide to a macromolecular carrier, such as keyhole limpet hemacyanin (KLH) or tetanus toxoid. For instance, peptides containing cysteine residues may be coupled to a carrier using a linker such as maleimidobenzoyl-N-hydroxysuccinimide ester (MBS), while other peptides may be coupled to carriers using a more general linking agent such as glutaraldehyde. Animals such as rabbits, rats and mice are immunized with either free or carrier-coupled peptides, for instance, by intraperitoneal and/or intradermal injection of emulsions containing about 100 μg of peptide or carrier protein and Freund's adjuvant or any other adjuvant known for stimulating an immune response. Several booster injections may be needed, for instance, at intervals of about two weeks, to provide a useful titer of anti-peptide antibody which can be detected, for example, by ELISA assay using free peptide adsorbed to a solid surface. The titer of anti-peptide antibodies in serum from an immunized animal may be increased by selection of anti-peptide antibodies, for instance, by adsorption to the peptide on a solid support and elution of the selected antibodies according to methods well known in the art.

[0200] As one of skill in the art will appreciate, and as discussed above, the polypeptides of the present invention (e.g., those comprising an immunogenic or antigenic epitope) can be fused to heterologous polypeptide sequences. For example, polypeptides of the present invention (including fragments or variants thereof), may be fused with the constant domain of immunoglobulins (IgA, IgE, IgG, IgM), or portions thereof (CH1, CH2, CH3, or any combination thereof and portions thereof, resulting in chimeric polypeptides. By way of another non-limiting example, polypeptides and/or antibodies of the present invention (including fragments or variants thereof) may be fused with albumin (including but not limited to recombinant human serum albumin or fragments or variants thereof (see, e.g., U.S. Pat. No. 5,876,969, issued Mar. 2, 1999, EP Patent 0 413 622, and U.S. Pat. No. 5,766,883, issued Jun. 16, 1998, herein incorporated by reference in their entirety)). In a preferred embodiment, polypeptides and/or antibodies of the present invention (including fragments or variants thereof) are fused with the mature form of human serum albumin (i.e., amino acids 1-585 of human serum albumin as shown in FIGS. 1 and 2 of EP Patent 0 322 094) which is herein incorporated by reference in its entirety. In another preferred embodiment, polypeptides and/or antibodies of the present invention (including fragments or variants thereof) are fused with polypeptide fragments comprising, or alternatively consisting of, amino acid residues 1-z of human serum albumin, where z is an integer from 369 to 419, as described in U.S. Pat. No. 5,766,883 herein incorporated by reference in its entirety. Polypeptides and/or antibodies of the present invention (including fragments or variants thereof) may be fused to either the N- or C-terminal end of the heterologous protein (e.g., immunoglobulin Fc polypeptide or human serum albumin polypeptide). Polynucleotides encoding fusion proteins of the invention are also encompassed by the invention.

[0201] Such fusion proteins as those described above may facilitate purification and may increase half-life in vivo. This has been shown for chimeric proteins consisting of the first two domains of the human CD4-polypeptide and various domains of the constant regions of the heavy or light chains of mammalian immunoglobulins. See, e.g., EP 394,827; Traunecker et al., Nature, 331:84-86 (1988). Enhanced delivery of an antigen across the epithelial barrier to the immune system has been demonstrated for antigens (e.g., insulin) conjugated to an FcRn binding partner such as IgG or Fc fragments (see, e.g., PCT Publications WO 96/22024 and WO 99/04813). IgG fusion proteins that have a disulfide-linked dimeric structure due to the IgG portion desulfide bonds have also been found to be more efficient in binding and neutralizing other molecules than monomeric polypeptides or fragments thereof alone. See, e.g., Fountoulakis et al., J. Biochem., 270:3958-3964 (1995). Nucleic acids encoding the above epitopes can also be recombined with a gene of interest as an epitope tag (e.g., the hemagglutinin (HA) tag or flag tag) to aid in detection and purification of the expressed polypeptide. For example, a system described by Janknecht et al. allows for the ready purification of non-denatured fusion proteins expressed in human cell lines (Janknecht et al., 1991, Proc. Natl. Acad. Sci. USA 88:8972-897). In this system, the gene of interest is subcloned into a vaccinia recombination plasmid such that the open reading frame of the gene is translationally fused to an amino-terminal tag consisting of six histidine residues. The tag serves as a matrix binding domain for the fusion protein. Extracts from cells infected with the recombinant vaccinia virus are loaded onto Ni2+ nitriloacetic acid-agarose column and histidine-tagged proteins can be selectively eluted with imidazole-containing buffers.

[0202] Fusion Proteins

[0203] Any polypeptide of the present invention can be used to generate fusion proteins. For example, the polypeptide of the present invention, when fused to a second protein, can be used as an antigenic tag. Antibodies raised against the polypeptide of the present invention can be used to indirectly detect the second protein by binding to the polypeptide. Moreover, because secreted proteins target cellular locations based on trafficking signals, polypeptides of the present invention which are shown to be secreted can be used as targeting molecules once fused to other proteins.

[0204] Examples of domains that can be fused to polypeptides of the present invention include not only heterologous signal sequences, but also other heterologous functional regions. The fusion does not necessarily need to be direct, but may occur through linker sequences.

[0205] In certain preferred embodiments, proteins of the invention are fusion proteins comprising an amino acid sequence that is an N and/or C-terminal deletion of a polypeptide of the invention. In preferred embodiments, the invention is directed to a fusion protein comprising an amino acid sequence that is at least 90%, 95%, 96%, 97%, 98% or 99% identical to a polypeptide sequence of the invention. Polynucleotides encoding these proteins are also encompassed by the invention.

[0206] Moreover, fusion proteins may also be engineered to improve characteristics of the polypeptide of the present invention. For instance, a region of additional amino acids, particularly charged amino acids, may be added to the N-terminus of the polypeptide to improve stability and persistence during purification from the host cell or subsequent handling and storage. Also, peptide moieties may be added to the polypeptide to facilitate purification. Such regions may be removed prior to final preparation of the polypeptide. The addition of peptide moieties to facilitate handling of polypeptides are familiar and routine techniques in the art.

[0207] As one of skill in the art will appreciate that, as discussed above, polypeptides of the present invention, and epitope-bearing fragments thereof, can be combined with heterologous polypeptide sequences. For example, the polypeptides of the present invention may be fused with heterologous polypeptide sequences, for example, the polypeptides of the present invention may be fused with the constant domain of immunoglobulins (IgA, IgE, IgG, IgM) or portions thereof (CHI1, CH2, CH3, and any combination thereof, including both entire domains and portions thereof), or albumin (including, but not limited to, native or recombinant human albumin or fragments or variants thereof (see, e.g., U.S. Pat. No. 5,876,969, issued Mar. 2, 1999, EP Patent 0 413 622, and U.S. Pat. No. 5,766,883, issued Jun. 16, 1998, herein incorporated by reference in their entirety)), resulting in chimeric polypeptides. For example, EP-A-O 464 533 (Canadian counterpart 2045869) discloses fusion proteins comprising various portions of constant region of immunoglobulin molecules together with another human protein or part thereof. In many cases, the Fc part in a fusion protein is beneficial in therapy and diagnosis, and thus can result in, for example, improved pharmacokinetic properties (EP-A 0232 262). Alternatively, deleting the Fc part after the fusion protein has been expressed, detected, and purified, would be desired. For example, the Fc portion may hinder therapy and diagnosis if the fusion protein is used as an antigen for immunizations. In drug discovery, for example, human proteins, such as hIL-5, have been fused with Fc portions for the purpose of high-throughput screening assays to identify antagonists of hIL-5. See, D. Bennett et al., J. Molecular Recognition 8:52-58 (1995); K. Johanson et al., J. Biol. Chem. 270:9459-9471 (1995).

[0208] Moreover, the polypeptides of the present invention can be fused to marker sequences, such as a polypeptide which facilitates purification of the fused polypeptide. In preferred embodiments, the marker amino acid sequence is a hexa-histidine peptide, such as the tag provided in a pQE vector (QIAGEN, Inc., 9259 Eton Avenue, Chatsworth, Calif., 91311), among others, many of which are commercially available. As described in Gentz et al., Proc. Natl. Acad. Sci. USA 86:821-824 (1989), for instance, hexa-histidine provides for convenient purification of the fusion protein. Another peptide tag useful for purification, the “HA” tag, corresponds to an epitope derived from the influenza hemagglutinin protein (Wilson et al., Cell 37:767 (1984)).

[0209] Additional fusion proteins of the invention may be generated through the techniques of gene-shuffling, motif-shuffling, exon-shuffling, and/or codon-shuffling (collectively referred to as “DNA shuffling”). DNA shuffling may be employed to modulate the activities of polypeptides of the invention, such methods can be used to generate polypeptides with altered activity, as well as agonists and antagonists of the polypeptides. See, generally, U.S. Pat. Nos. 5,605,793; 5,811,238; 5,830,721; 5,834,252; and 5,837,458, and Patten et al., Curr. Opinion Biotechnol. 8:724-33 (1997); Harayama, Trends Biotechnol. 16(2):76-82 (1998); Hansson, et al., J. Mol. Biol. 287:265-76 (1999); and Lorenzo and Blasco, Biotechniques 24(2):308-13 (1998) (each of these patents and publications are hereby incorporated by reference in its entirety). In one embodiment, alteration of polynucleotides corresponding to SEQ ID NO:X and the polypeptides encoded by these polynucleotides may be achieved by DNA shuffling. DNA shuffling involves the assembly of two or more DNA segments by homologous or site-specific recombination to generate variation in the polynucleotide sequence. In another embodiment, polynucleotides of the invention, or the encoded polypeptides, may be altered by being subjected to random mutagenesis by error-prone PCR, random nucleotide insertion or other methods prior to recombination. In another embodiment, one or more components, motifs, sections, parts, domains, fragments, etc., of a polynucleotide encoding a polypeptide of the invention may be recombined with one or more components, motifs, sections, parts, domains, fragments, etc. of one or more heterologous molecules.

[0210] Thus, any of these above fusions can be engineered using the polynucleotides or the polypeptides of the present invention.

[0211] Recombinant and Synthetic Production of Polypeptides of the Invention

[0212] The present invention also relates to vectors containing the polynucleotide of the present invention, host cells, and the production of polypeptides by synthetic and recombinant techniques. The vector may be, for example, a phage, plasmid, viral, or retroviral vector. Retroviral vectors may be replication competent or replication defective. In the latter case, viral propagation generally will occur only in complementing host cells.

[0213] The polynucleotides of the invention may be joined to a vector containing a selectable marker for propagation in a host. Generally, a plasmid vector is introduced in a precipitate, such as a calcium phosphate precipitate, or in a complex with a charged lipid. If the vector is a virus, it may be packaged in vitro using an appropriate packaging cell line and then transduced into host cells.

[0214] The polynucleotide insert should be operatively linked to an appropriate promoter, such as the phage lambda PL promoter, the E. coli lac, trp, phoA and tac promoters, the SV40 early and late promoters and promoters of retroviral LTRs, to name a few. Other suitable promoters will be known to the skilled artisan. The expression constructs will further contain sites for transcription initiation, termination, and, in the transcribed region, a ribosome binding site for translation. The coding portion of the transcripts expressed by the constructs will preferably include a translation initiating codon at the beginning and a termination codon (UAA, UGA or UAG) appropriately positioned at the end of the polypeptide to be translated.

[0215] As indicated, the expression vectors will preferably include at least one selectable marker. Such markers include dihydrofolate reductase, G418, glutamine synthase, or neomycin resistance for eukaryotic cell culture, and tetracycline, kanamycin or ampicillin resistance genes for culturing in E. coli and other bacteria. Representative examples of appropriate hosts include, but are not limited to, bacterial cells, such as E. coli, Streptomyces and Salmonella typhimurium cells; fungal cells, such as yeast cells (e.g., Saccharomyces cerevisiae or Pichia pastoris (ATCC Accession No. 201178)); insect cells such as Drosophila S2 and Spodoptera Sf9 cells; animal cells such as CHO, COS, 293, and Bowes melanoma cells; and plant cells. Appropriate culture mediums and conditions for the above-described host cells are known in the art.

[0216] Among vectors preferred for use in bacteria include pQE70, pQE60 and pQE-9, available from QIAGEN, Inc.; pBluescript vectors, Phagescript vectors, pNH8A, pNH16a, pNH18A, pNH46A, available from Stratagene Cloning Systems, Inc.; and ptrc99a, pKK223-3, pKK233-3, pDR540, pRIT5 available from Pharmacia Biotech, Inc. Among preferred eukaryotic vectors are pWLNEO, pSV2CAT, pOG44, pXT1 and pSG available from Stratagene; and pSVK3, pBPV, pMSG and pSVL available from Pharmacia. Preferred expression vectors for use in yeast systems include, but are not limited to pYES2, pYD1, pTEF1/Zeo, pYES2/GS, pPICZ, pGAPZ, pGAPZalph, pPIC9, pPIC3.5, pHIL-D2, pHIL-S1, pPIC3.5K, pPIC9K, and PA0815 (all available from Invitrogen, Carlbad, Calif.). Other suitable vectors will be readily apparent to the skilled artisan.

[0217] Vectors which use glutamine synthase (GS) or DHFR as the selectable markers can be amplified in the presence of the drugs methionine sulphoximine or methotrexate, respectively. An advantage of glutamine synthase based vectors are the availabilty of cell lines (e.g., the murine myeloma cell line, NSO) which are glutamine synthase negative. Glutamine synthase expression systems can also function in glutamine synthase expressing cells (e.g., Chinese Hamster Ovary (CHO) cells) by providing additional inhibitor to prevent the functioning of the endogenous gene. A glutamine synthase expression system and components thereof are detailed in PCT publications: WO87/04462; WO86/05807; WO89/01036; WO89/10404; and WO91/06657, which are hereby incorporated in their entireties by reference herein. Additionally, glutamine synthase expression vectors can be obtained from Lonza Biologics, Inc. (Portsmouth, N.H.). Expression and production of monoclonal antibodies using a GS expression system in murine myeloma cells is described in Bebbington et al., Bio/technology 10:169(1992) and in Biblia and Robinson Biotechnol. Prog. 11:1 (1995) which are herein incorporated by reference.

[0218] The present invention also relates to host cells containing the above-described vector constructs described herein, and additionally encompasses host cells containing nucleotide sequences of the invention that are operably associated with one or more heterologous control regions (e.g., promoter and/or enhancer) using techniques known of in the art. The host cell can be a higher eukaryotic cell, such as a mammalian cell (e.g., a human derived cell), or a lower eukaryotic cell, such as a yeast cell, or the host cell can be a prokaryotic cell, such as a bacterial cell. A host strain may be chosen which modulates the expression of the inserted gene sequences, or modifies and processes the gene product in the specific fashion desired. Expression from certain promoters can be elevated in the presence of certain inducers; thus expression of the genetically engineered polypeptide may be controlled. Furthermore, different host cells have characteristics and specific mechanisms for the translational and post-translational processing and modification (e.g., phosphorylation, cleavage) of proteins. Appropriate cell lines can be chosen to ensure the desired modifications and processing of the foreign protein expressed.

[0219] Introduction of the nucleic acids and nucleic acid constructs of the invention into the host cell can be effected by calcium phosphate transfection, DEAE-dextran mediated transfection, cationic lipid-mediated transfection, electroporation, transduction, infection, or other methods. Such methods are described in many standard laboratory manuals, such as Davis et al., Basic Methods In Molecular Biology (1986). It is specifically contemplated that the polypeptides of the present invention may in fact be expressed by a host cell lacking a recombinant vector.

[0220] In addition to encompassing host cells containing the vector constructs discussed herein, the invention also encompasses primary, secondary, and immortalized host cells of vertebrate origin, particularly mammalian origin, that have been engineered to delete or replace endogenous genetic material (e.g., the coding sequence), and/or to include genetic material (e.g., heterologous polynucleotide sequences) that is operably associated with polynucleotides of the invention, and which activates, alters, and/or amplifies endogenous polynucleotides. For example, techniques known in the art may be used to operably associate heterologous control regions (e.g., promoter and/or enhancer) and endogenous polynucleotide sequences via homologous recombination (see, e.g., U.S. Pat. No. 5,641,670, issued Jun. 24, 1997; International Publication Number WO 96/29411; International Publication Number WO 94/12650; Koller et al., Proc. Natl. Acad. Sci. USA 86:8932-8935 (1989); and Zijlstra et al., Nature 342:435-438 (1989), the disclosures of each of which are incorporated by reference in their entireties).

[0221] Polypeptides of the invention can be recovered and purified from recombinant cell cultures by well-known methods including ammonium sulfate or ethanol precipitation, acid extraction, anion or cation exchange chromatography, phosphocellulose chromatography, hydrophobic interaction chromatography, affinity chromatography, hydroxylapatite chromatography and lectin chromatography. Most preferably, high performance liquid chromatography (“HPLC”) is employed for purification.

[0222] Polypeptides of the present invention can also be recovered from: products purified from natural sources, including bodily fluids, tissues and cells, whether directly isolated or cultured; products of chemical synthetic procedures; and products produced by recombinant techniques from a prokaryotic or eukaryotic host, including, for example, bacterial, yeast, higher plant, insect, and mammalian cells. Depending upon the host employed in a recombinant production procedure, the polypeptides of the present invention may be glycosylated or may be non-glycosylated. In addition, polypeptides of the invention may also include an initial modified methionine residue, in some cases as a result of host-mediated processes. Thus, it is well known in the art that the N-terminal methionine encoded by the translation initiation codon generally is removed with high efficiency from any protein after translation in all eukaryotic cells. While the N-terminal methionine on most proteins also is efficiently removed in most prokaryotes, for some proteins, this prokaryotic removal process is inefficient, depending on the nature of the amino acid to which the N-terminal methionine is covalently linked.

[0223] In one embodiment, the yeast Pichia pastoris is used to express polypeptides of the invention in a eukaryotic system. Pichia pastoris is a methylotrophic yeast which can metabolize methanol as its sole carbon source. A main step in the methanol metabolization pathway is the oxidation of methanol to formaldehyde using O₂. This reaction is catalyzed by the enzyme alcohol oxidase. In order to metabolize methanol as its sole carbon source, Pichia pastoris must generate high levels of alcohol oxidase due, in part, to the relatively low affinity of alcohol oxidase for O₂. Consequently, in a growth medium depending on methanol as a main carbon source, the promoter region of one of the two alcohol oxidase genes (AOX1) is highly active. In the presence of methanol, alcohol oxidase produced from the AOX1 gene comprises up to approximately 30% of the total soluble protein in Pichia pastoris. See Ellis, S. B., et al., Mol. Cell. Biol. 5:1111-21 (1985); Koutz, P. J, et al., Yeast 5:167-77 (1989); Tschopp, J. F., et al., Nucl. Acids Res. 15:3859-76 (1987). Thus, a heterologous coding sequence, such as, for example, a polynucleotide of the present invention, under the transcriptional regulation of all or part of the AOX1 regulatory sequence is expressed at exceptionally high levels in Pichia yeast grown in the presence of methanol.

[0224] In one example, the plasmid vector pPIC9K is used to express DNA encoding a polypeptide of the invention, as set forth herein, in a Pichea yeast system essentially as described in “Pichia Protocols: Methods in Molecular Biology,” D. R. Higgins and J. Cregg, eds. The Humana Press, Totowa, N.J., 1998. This expression vector allows expression and secretion of a polypeptide of the invention by virtue of the strong AOX1 promoter linked to the Pichia pastoris alkaline phosphatase (PHO) secretory signal peptide (i.e., leader) located upstream of a multiple cloning site.

[0225] Many other yeast vectors could be used in place of pPIC9K, such as, pYES2, pYDI, pTEF1/Zeo, pYES2/GS, pPICZ, pGAPZ, pGAPZalpha, pPIC9, pPIC3.5, pHIL-D2, pHIL-S1, pPIC3.5K, and PAO815, as one skilled in the art would readily appreciate, as long as the proposed expression construct provides appropriately located signals for transcription, translation, secretion (if desired), and the like, including an in-frame AUG as required.

[0226] In another embodiment, high-level expression of a heterologous coding sequence, such as, for example, a polynucleotide of the present invention, may be achieved by cloning the heterologous polynucleotide of the invention into an expression vector such as, for example, pGAPZ or pGAPZalpha, and growing the yeast culture in the absence of methanol.

[0227] In addition to encompassing host cells containing the vector constructs discussed herein, the invention also encompasses primary, secondary, and immortalized host cells of vertebrate origin, particularly mammalian origin, that have been engineered to delete or replace endogenous genetic material (e.g., coding sequence), and/or to include genetic material (e.g., heterologous polynucleotide sequences) that is operably associated with polynucleotides of the invention, and which activates, alters, and/or amplifies endogenous polynucleotides. For example, techniques known in the art may be used to operably associate heterologous control regions (e.g., promoter and/or enhancer) and endogenous polynucleotide sequences via homologous recombination (see, e.g., U.S. Pat. No. 5,641,670, issued Jun. 24, 1997; International Publication No. WO 96/29411, published Sep. 26, 1996; International Publication No. WO 94/12650, published Aug. 4, 1994; Koller et al., Proc. Natl. Acad. Sci. USA 86:8932-8935 (1989); and Zijlstra et al., Nature 342:435-438 (1989), the disclosures of each of which are incorporated by reference in their entireties).

[0228] In addition, polypeptides of the invention can be chemically synthesized using techniques known in the art (e.g., see Creighton, 1983, Proteins: Structures and Molecular Principles, W.H. Freeman & Co., N.Y., and Hunkapiller et al., Nature, 310:105-111 (1984)). For example, a polypeptide corresponding to a fragment of a polypeptide can be synthesized by use of a peptide synthesizer. Furthermore, if desired, nonclassical amino acids or chemical amino acid analogs can be introduced as a substitution or addition into the polypeptide sequence. Non-classical amino acids include, but are not limited to, to the D-isomers of the common amino acids, 2,4-diaminobutyric acid, a-amino isobutyric acid, 4-aminobutyric acid, Abu, 2-amino butyric acid, g-Abu, e-Ahx, 6amino hexanoic acid, Aib, 2-amino isobutyric acid, 3-amino propionic acid, ornithine, norleucine, norvaline, hydroxyproline, sarcosine, citrulline, homocitrulline, cysteic acid, t-butylglycine, t-butylalanine, phenylglycine, cyclohexylalanine, b-alanine, fluoro-amino acids, designer amino acids such as b-methyl amino acids, Ca-methyl amino acids, Na-methyl amino acids, and amino acid analogs in general. Furthermore, the amino acid can be D (dextrorotary) or L (levorotary).

[0229] The invention encompasses polypeptides of the present invention which are differentially modified during or after translation, e.g., by glycosylation, acetylation, phosphorylation, amidation, derivatization by known protectingiblocking groups, proteolytic cleavage, linkage to an antibody molecule or other cellular ligand, etc. Any of numerous chemical modifications may be carried out by known techniques, including but not limited, to specific chemical cleavage by cyanogen bromide, trypsin, chymotrypsin, papain, V8 protease, NaBH₄; acetylation, formylation, oxidation, reduction; metabolic synthesis in the presence of tunicamycin; etc.

[0230] Additional post-translational modifications encompassed by the invention include, for example, e.g., N-linked or O-linked carbohydrate chains, processing of N-terminal or C-terminal ends), attachment of chemical moieties to the amino acid backbone, chemical modifications of N-linked or O-linked carbohydrate chains, and addition or deletion of an N-terminal methionine residue as a result of procaryotic host cell expression. The polypeptides may also be modified with a detectable label, such as an enzymatic, fluorescent, isotopic or affinity label to allow for detection and isolation of the protein.

[0231] Examples of suitable enzymes include horseradish peroxidase, alkaline phosphatase, beta-galactosidase, or acetylcholinesterase; examples of suitable prosthetic group complexes include streptavidin/biotin and avidin/biotin; examples of suitable fluorescent materials include umbelliferone, fluorescein, fluorescein isothiocyanate, rhodamine, dichlorotriazinylamine fluorescein, dansyl chloride or phycoerythrin; an example of a luminescent material includes luminol; examples of bioluminescent materials include luciferase, luciferin, and aequorin; and examples of suitable radioactive material include iodine (¹²¹I, ¹²³I, ¹²⁵I, ¹³¹I), carbon (¹⁴C), sulfur (³⁵S), tritium (³H), indium (¹¹¹In, ¹¹²In, ^{113m}In, ^{115m}In), technetium (⁹⁹Tc,^{99m}Tc), thallium (²⁰¹Ti), gallium (⁶⁸Ga, ⁶⁷Ga), palladium (¹⁰³Pd), molybdenum (⁹⁹Mo), xenon (¹³³Xe), fluorine (¹⁸F), ¹⁵³Sm, ¹⁷⁷Lu, ¹⁵⁹Gd, ¹⁴⁹pm, ¹⁴⁰La, ¹⁷⁵Yb, ¹⁶⁶Ho, ⁹⁰Y, 47Sc ¹⁸⁶Re, ¹⁸⁸Re, ¹⁴²Pr, ¹⁰⁵Rh, and ⁹⁷Ru.

[0232] In specific embodiments, a polypeptide of the present invention or fragment or variant thereof is attached to macrocyclic chelators that associate with radiometal ions, including but not limited to, ¹⁷⁷Lu, ⁹⁰Y, ¹⁶⁶Ho, and ¹⁵³Sm, to polypeptides. In a preferred embodiment, the radiometal ion associated with the macrocyclic chelators is ¹¹¹n. In another preferred embodiment, the radiometal ion associated with the macrocyclic chelator is ⁹⁰Y. In specific embodiments, the macrocyclic chelator is 1,4,7,10-tetraazacyclododecane-N,N′,N″,N′″-tetraacetic acid (DOTA). In other specific embodiments, DOTA is attached to an antibody of the invention or fragment thereof via a linker molecule. Examples of linker molecules useful for conjugating DOTA to a polypeptide are commonly known in the art—see, for example, DeNardo et al., Clin Cancer Res. 4(10):2483-90 (1998); Peterson et al., Bioconjug. Chem. 10(4):553-7 (1999); and Zimmerman et al, Nucl. Med. Biol. 26(8):943-50 (1999); which are hereby incorporated by reference in their entirety.

[0233] As mentioned, the proteins of the invention may be modified by either natural processes, such as posttranslational processing, or by chemical modification techniques which are well known in the art. It will be appreciated that the same type of modification may be present in the same or varying degrees at several sites in a given polypeptide. Polypeptides of the invention may be branched, for example, as a result of ubiquitination, and they may be cyclic, with or without branching. Cyclic, branched, and branched cyclic polypeptides may result from posttranslation natural processes or may be made by synthetic methods. Modifications include acetylation, acylation, ADP-ribosylation, amidation, covalent attachment of flavin, covalent attachment of a heme moiety, covalent attachment of a nucleotide or nucleotide derivative, covalent attachment of a lipid or lipid derivative, covalent attachment of phosphotidylinositol, cross-linking, cyclization, disulfide bond formation, demethylation, formation of covalent cross-links, formation of cysteine, formation of pyroglutamate, formylation, gamma-carboxylation, glycosylation, GPI anchor formation, hydroxylation, iodination, methylation, myristoylation, oxidation, pegylation, proteolytic processing, phosphorylation, prenylation, racemization, selenoylation, sulfation, transfer-RNA mediated addition of amino acids to proteins such as arginylation, and ubiquitination. (See, for instance, PROTEINS—STRUCTURE AND MOLECULAR PROPERTIES, 2nd Ed., T. E. Creighton, W. H. Freeman and Company, New York (1993); POSTTRANSLATIONAL COVALENT MODIFICATION OF PROTEINS, B. C. Johnson, Ed., Academic Press, New York, pgs. 1-12 (1983); Seifter et al., Meth. Enzymol. 182:626-646 (1990); Rattan et al., Ann. N.Y. Acad. Sci. 663:48-62 (1992)).

[0234] Also provided by the invention are chemically modified derivatives of the polypeptides of the invention which may provide additional advantages such as increased solubility, stability and circulating time of the polypeptide, or decreased immunogenicity (see U.S. Pat. No. 4,179,337). The chemical moieties for derivitization may be selected from water soluble polymers such as polyethylene glycol, ethylene glycol/propylene glycol copolymers, carboxymethylcellulose, dextran, polyvinyl alcohol and the like. The polypeptides may be modified at random positions within the molecule, or at predetermined positions within the molecule and may include one, two, three or more attached chemical moieties.

[0235] The polymer may be of any molecular weight, and may be branched or unbranched. For polyethylene glycol, the preferred molecular weight is between about 1 kDa and about 100 kDa (the term “about” indicating that in preparations of polyethylene glycol, some molecules will weigh more, some less, than the stated molecular weight) for ease in handling and manufacturing. Other sizes may be used, depending on the desired therapeutic profile (e.g., the duration of sustained release desired, the effects, if any on biological activity, the ease in handling, the degree or lack of antigenicity and other known effects of the polyethylene glycol to a therapeutic protein or analog). For example, the polyethylene glycol may have an average molecular weight of about 200, 500, 1000, 1500, 2000, 2500, 3000, 3500, 4000, 4500, 5000, 5500, 6000, 6500, 7000, 7500, 8000, 8500, 9000, 9500, 10,000, 10,500, 11,000, 11,500, 12,000, 12,500, 13,000, 13,500, 14,000, 14,500, 15,000, 15,500, 16,000, 16,500, 17,000, 17,500, 18,000, 18,500, 19,000, 19,500, 20,000, 25,000, 30,000, 35,000, 40,000, 45,000, 50,000, 55,000, 60,000, 65,000, 70,000, 75,000, 80,000, 85,000, 90,000, 95,000, or 100,000 kDa.

[0236] As noted above, the polyethylene glycol may have a branched structure. Branched polyethylene glycols are described, for example, in U.S. Pat. No. 5,643,575; Morpurgo et al., Appl. Biochem. Biotechnol. 56:59-72 (1996); Vorobjev et al., Nucleosides Nucleotides 18:2745-2750 (1999); and Caliceti et al., Bioconjug. Chem. 10:638-646 (1999), the disclosures of each of which are incorporated herein by reference.

[0237] The polyethylene glycol molecules (or other chemical moieties) should be attached to the protein with consideration of effects on functional or antigenic domains of the protein. There are a number of attachment methods available to those skilled in the art, such as, for example, the method disclosed in EP 0 401 384 (coupling PEG to G-CSF), herein incorporated by reference; see also Malik et al., Exp. Hematol. 20:1028-1035 (1992), reporting pegylation of GM-CSF using tresyl chloride. For example, polyethylene glycol may be covalently bound through amino acid residues via a reactive group, such as a free amino or carboxyl group. Reactive groups are those to which an activated polyethylene glycol molecule may be bound. The amino acid residues having a free amino group may include lysine residues and the N-terminal amino acid residues; those having a free carboxyl group may include aspartic acid residues glutamic acid residues and the C-terminal amino acid residue. Sulfhydryl groups may also be used as a reactive group for attaching the polyethylene glycol molecules. Preferred for therapeutic purposes is attachment at an amino group, such as attachment at the N-terminus or lysine group.

[0238] As suggested above, polyethylene glycol may be attached to proteins via linkage to any of a number of amino acid residues. For example, polyethylene glycol can be linked to proteins via covalent bonds to lysine, histidine, aspartic acid, glutamic acid, or cysteine residues. One or more reaction chemistries may be employed to attach polyethylene glycol to specific amino acid residues (e.g., lysine, histidine, aspartic acid, glutamic acid, or cysteine) of the protein or to more than one type of amino acid residue (e.g., lysine, histidine, aspartic acid, glutamic acid, cysteine and combinations thereof) of the protein.

[0239] One may specifically desire proteins chemically modified at the N-terminus. Using polyethylene glycol as an illustration of the present composition, one may select from a variety of polyethylene glycol molecules (by molecular weight, branching, etc.), the proportion of polyethylene glycol molecules to protein (polypeptide) molecules in the reaction mix, the type of pegylation reaction to be performed, and the method of obtaining the selected N-terminally pegylated protein. The method of obtaining the N-terminally pegylated preparation (i.e., separating this moiety from other monopegylated moieties if necessary) may be by purification of the N-terminally pegylated material from a population of pegylated protein molecules. Selective proteins chemically modified at the N-terminus modification may be accomplished by reductive alkylation which exploits differential reactivity of different types of primary amino groups (lysine versus the N-terminal) available for derivatization in a particular protein. Under the appropriate reaction conditions, substantially selective derivatization of the protein at the N-terninus with a carbonyl group containing polymer is achieved.

[0240] As indicated above, pegylation of the proteins of the invention may be accomplished by any number of means. For example, polyethylene glycol may be attached to the protein either directly or by an intervening linker. Linkerless systems for attaching polyethylene glycol to proteins are described in Delgado et al., Crit. Rev. Thera. Drug Carrier Sys. 9:249-304 (1992); Francis et al., Intern. J. of Hematol. 68:1-18 (1998); U.S. Pat. No. 4,002,531; U.S. Pat. No. 5,349,052; WO 95/06058; and WO 98/32466, the disclosures of each of which are incorporated herein by reference.

[0241] One system for attaching polyethylene glycol directly to amino acid residues of proteins without an intervening linker employs tresylated MPEG, which is produced by the modification of monmethoxy polyethylene glycol (MPEG) using tresylchloride (ClSO₂CH₂CF₃). Upon reaction of protein with tresylated MPEG, polyethylene glycol is directly attached to amine groups of the protein. Thus, the invention includes protein-polyethylene glycol conjugates produced by reacting proteins of the invention with a polyethylene glycol molecule having a 2,2,2-trifluoreothane sulphonyl group.

[0242] Polyethylene glycol can also be attached to proteins using a number of different intervening linkers. For example, U.S. Pat. No. 5,612,460, the entire disclosure of which is incorporated herein by reference, discloses urethane linkers for connecting polyethylene glycol to proteins. Protein-polyethylene glycol conjugates wherein the polyethylene glycol is attached to the protein by a linker can also be produced by reaction of proteins with compounds such as MPEG-succinimidylsuccinate, MPEG activated with 1,1′-carbonyldiimidazole, MPEG-2,4,5-trichloropenylcarbonate, MPEG-p-nitrophenolcarbonate, and various MPEG-succinate derivatives. A number of additional polyethylene glycol derivatives and reaction chemistries for attaching polyethylene glycol to proteins are described in International Publication No. WO 98/32466, the entire disclosure of which is incorporated herein by reference. Pegylated protein products produced using the reaction chemistries set out herein are included within the scope of the invention.

[0243] The number of polyethylene glycol moieties attached to each protein of the invention (i.e., the degree of substitution) may also vary. For example, the pegylated proteins of the invention may be linked, on average, to 1, 2, 3, 4, 5, 6, 7, 8, 9, 10, 12, 15, 17, 20, or more polyethylene glycol molecules. Similarly, the average degree of substitution within ranges such as 1-3,2-4,3-5,4-6, 5-7,6-8,7-9, 8-10,9-11, 10^{-12, 11}-13, 12-14, 13-15, 14-16, 15-17, 16-18, 17-19, or 18-20 polyethylene glycol moieties per protein molecule. Methods for determining the degree of substitution are discussed, for example, in Delgado et al., Crit. Rev. Thera. Drug Carrier Sys. 9:249-304 (1992).

[0244] The polypeptides of the invention can be recovered and purified from chemical synthesis and recombinant cell cultures by standard methods which include, but are not limited to, ammonium sulfate or ethanol precipitation, acid extraction, anion or cation exchange chromatography, phosphocellulose chromatography, hydrophobic interaction chromatography, affinity chromatography, hydroxylapatite chromatography and lectin chromatography. Most preferably, high performance liquid chromatography (“HPLC”) is employed for purification. Well known techniques for refolding protein may be employed to regenerate active conformation when the polypeptide is denatured during isolation and/or purification.

[0245] The polypeptides of the invention may be in monomers or multimers (i.e., dimers, trimers, tetramers and higher multimers). Accordingly, the present invention relates to monomers and multimers of the polypeptides of the invention, their preparation, and compositions (preferably, Therapeutics) containing them. In specific embodiments, the polypeptides of the invention are monomers, dimers, trimers or tetramers. In additional embodiments, the multimers of the invention are at least dimers, at least trimers, or at least tetramers.

[0246] Multimers encompassed by the invention may be homomers or heteromers. As used herein, the term homomer refers to a multimer containing only polypeptides corresponding to a protein of the invention (e.g., the amino acid sequence of SEQ ID NO:Y, an amino acid sequence encoded by SEQ ID NO:X or the complement of SEQ ID NO:X, the amino acid sequence encoded by the portion of SEQ ID NO:X as defined in columns 8 and 9 of Table 2, and/or an amino acid sequence encoded by cDNA contained in Clone ID NO:Z (including fragments, variants, splice variants, and fusion proteins, corresponding to these as described herein)). These homomers may contain polypeptides having identical or different amino acid sequences. In a specific embodiment, a homomer of the invention is a multimer containing only polypeptides having an identical amino acid sequence. In another specific embodiment, a homomer of the invention is a multimer containing polypeptides having different amino acid sequences. In specific embodiments, the multimer of the invention is a homodimer (e.g., containing two polypeptides having identical or different amino acid sequences) or a homotrimer (e.g., containing three polypeptides having identical and/or different amino acid sequences). In additional embodiments, the homomeric multimer of the invention is at least a homodimer, at least a homotrimer, or at least a homotetramer.

[0247] As used herein, the term heteromer refers to a multimer containing one or more heterologous polypeptides (i.e., polypeptides of different proteins) in addition to the polypeptides of the invention. In a specific embodiment, the multimer of the invention is a heterodimer, a heterotrimer, or a heterotetramer. In additional embodiments, the heteromeric multimer of the invention is at least a heterodimer, at least a heterotrimer, or at least a heterotetramer.

[0248] Multimers of the invention may be the result of hydrophobic, hydrophilic, ionic and/or covalent associations and/or may be indirectly linked by, for example, liposome formation. Thus, in one embodiment, multimers of the invention, such as, for example, homodimers or homotrimers, are formed when polypeptides of the invention contact one another in solution. In another embodiment, heteromultimers of the invention, such as, for example, heterotrimers or heterotetramers, are formed when polypeptides of the invention contact antibodies to the polypeptides of the invention (including antibodies to the heterologous polypeptide sequence in a fusion protein of the invention) in solution. In other embodiments, multimers of the invention are formed by covalent associations with and/or between the polypeptides of the invention. Such covalent associations may involve one or more amino acid residues contained in the polypeptide sequence (e.g., that recited in SEQ ID NO:Y, encoded by the portion of SEQ ID NO:X as defined in columns 8 and 9 of Table 2, and/or encoded by the cDNA contained in Clone ID NO:Z). In one instance, the covalent associations are cross-linking between cysteine residues located within the polypeptide sequences which interact in the native (i.e., naturally occurring) polypeptide. In another instance, the covalent associations are the consequence of chemical or recombinant manipulation. Alternatively, such covalent associations may involve one or more amino acid residues contained in the heterologous polypeptide sequence in a fusion protein. In one example, covalent associations are between the heterologous sequence contained in a fusion protein of the invention (see, e.g., U.S. Pat. No. 5,478,925). In a specific example, the covalent associations are between the heterologous sequence contained in a Fc fusion protein of the invention (as described herein). In another specific example, covalent associations of fusion proteins of the invention are between heterologous polypeptide sequence from another protein that is capable of forming covalently associated multimers, such as for example, osteoprotegerin (see, e.g., International Publication NO: WO 98/49305, the contents of which are herein incorporated by reference in its entirety). In another embodiment, two or more polypeptides of the invention are joined through peptide linkers. Examples include those peptide linkers described in U.S. Pat. No. 5,073,627 (hereby incorporated by reference). Proteins comprising multiple polypeptides of the invention separated by peptide linkers may be produced using conventional recombinant DNA technology.

[0249] Another method for preparing multimer polypeptides of the invention involves use of polypeptides of the invention fused to a leucine zipper or isoleucine zipper polypeptide sequence. Leucine zipper and isoleucine zipper domains are polypeptides that promote multimerization of the proteins in which they are found. Leucine zippers were originally identified in several DNA-binding proteins (Landschulz et al., Science 240:1759, (1988)), and have since been found in a variety of different proteins. Among the known leucine zippers are naturally occurring peptides and derivatives thereof that dimerize or trimerize. Examples of leucine zipper domains suitable for producing soluble multimeric proteins of the invention are those described in PCT application WO 94/10308, hereby incorporated by reference. Recombinant fusion proteins comprising a polypeptide of the invention fused to a polypeptide sequence that dimerizes or trimerizes in solution are expressed in suitable host cells, and the resulting soluble multimeric fusion protein is recovered from the culture supernatant using techniques known in the art.

[0250] Trimeric polypeptides of the invention may offer the advantage of enhanced biological activity. Preferred leucine zipper moieties and isoleucine moieties are those that preferentially form trimers. One example is a leucine zipper derived from lung surfactant protein D (SPD), as described in Hoppe et al. (FEBS Letters 344:191, (1994)) and in U.S. patent application Ser. No. 08/446,922, hereby incorporated by reference. Other peptides derived from naturally occurring trimeric proteins may be employed in preparing trimeric polypeptides of the invention.

[0251] In another example, proteins of the invention are associated by interactions between Flag® polypeptide sequence contained in fusion proteins of the invention containing Flag® polypeptide sequence. In a further embodiment, proteins of the invention are associated by interactions between heterologous polypeptide sequence contained in Flag® fusion proteins of the invention and anti-Flag® antibody.

[0252] The multimers of the invention may be generated using chemical techniques known in the art. For example, polypeptides desired to be contained in the multimers of the invention may be chemically cross-linked using linker molecules and linker molecule length optimization techniques known in the art (see, e.g., U.S. Pat. No. 5,478,925, which is herein incorporated by reference in its entirety). Additionally, multimers of the invention may be generated using techniques known in the art to form one or more inter-molecule cross-links between the cysteine residues located within the sequence of the polypeptides desired to be contained in the multimer (see, e.g., U.S. Pat. No. 5,478,925, which is herein incorporated by reference in its entirety). Further, polypeptides of the invention may be routinely modified by the addition of cysteine or biotin to the C-terminus or N-terminus of the polypeptide and techniques known in the art may be applied to generate multimers containing one or more of these modified polypeptides (see, e.g., U.S. Pat. No. 5,478,925, which is herein incorporated by reference in its entirety). Additionally, techniques known in the art may be applied to generate liposomes containing the polypeptide components desired to be contained in the multimer of the invention (see, e.g., U.S. Pat. No. 5,478,925, which is herein incorporated by reference in its entirety).

[0253] Alternatively, multimers of the invention may be generated using genetic engineering techniques known in the art. In one embodiment, polypeptides contained in multimers of the invention are produced recombinantly using fusion protein technology described herein or otherwise known in the art (see, e.g., U.S. Pat. No. 5,478,925, which is herein incorporated by reference in its entirety). In a specific embodiment, polynucleotides coding for a homodimer of the invention are generated by ligating a polynucleotide sequence encoding a polypeptide of the invention to a sequence encoding a linker polypeptide and then further to a synthetic polynucleotide encoding the translated product of the polypeptide in the reverse orientation from the original C-terminus to the N-terminus (lacking the leader sequence) (see, e.g., U.S. Pat. No. 5,478,925, which is herein incorporated by reference in its entirety). In another embodiment, recombinant techniques described herein or otherwise known in the art are applied to generate recombinant polypeptides of the invention which contain a transmembrane domain (or hydrophobic or signal peptide) and which can be incorporated by membrane reconstitution techniques into liposomes (see, e.g., U.S. Pat. No. 5,478,925, which is herein incorporated by reference in its entirety). Antibodies

[0254] Further polypeptides of the invention relate to antibodies and T-cell antigen receptors (TCR) which immunospecifically bind a polypeptide, polypeptide fragment, or variant of the invention (e.g., a polypeptide or fragment or variant of the amino acid sequence of SEQ ID NO:Y or a polypeptide encoded by the cDNA contained in Clone ID No:Z, and/or an epitope, of the present invention) as determined by immunoassays well known in the art for assaying specific antibody-antigen binding. Antibodies of the invention include, but are not limited to, polyclonal, monoclonal, multispecific, human, humanized or chimeric antibodies, single chain antibodies, Fab fragments, F(ab′) fragments, fragments produced by a Fab expression library, anti-idiotypic (anti-Id) antibodies (including, e.g., anti-Id antibodies to antibodies of the invention), intracellularly-made antibodies (i.e., intrabodies), and epitope-binding fragments of any of the above. The term “antibody,” as used herein, refers to immunoglobulin molecules and immunologically active portions of immunoglobulin molecules, i.e., molecules that contain an antigen binding site that immunospecifically binds an antigen. The immunoglobulin molecules of the invention can be of any type (e.g., IgG, IgE, IgM, IgD, IgA and IgY), class (e.g., IgG1, IgG2, IgG3, IgG4, IgAl and IgA2) or subclass of immunoglobulin molecule. In preferred embodiments, the immunoglobulin molecules of the invention are IgG1. In other preferred embodiments, the immunoglobulin molecules of the invention are IgG4.

[0255] Most preferably the antibodies are human antigen-binding antibody fragments of the present invention and include, but are not limited to, Fab, Fab′ and F(ab′)2, Fd, single-chain Fvs (scFv), single-chain antibodies, disulfide-linked Fvs (sdFv) and fragments comprising either a VL or VH domain. Antigen-binding antibody fragments, including single-chain antibodies, may comprise the variable region(s) alone or in combination with the entirety or a portion of the following: hinge region, CH1, CH2, and CH3 domains. Also included in the invention are antigen-binding fragments also comprising any combination of variable region(s) with a hinge region, CH1, CH2, and CH3 domains. The antibodies of the invention may be from any animal origin including birds and mammals. Preferably, the antibodies are human, murine (e.g., mouse and rat), donkey, ship rabbit, goat, guinea pig, camel, horse, or chicken. As used herein, “human” antibodies include antibodies having the amino acid sequence of a human immunoglobulin and include antibodies isolated from human immunoglobulin libraries or from animals transgenic for one or more human immunoglobulin and that do not express endogenous immunoglobulins, as described infra and, for example in, U.S. Pat. No. 5,939,598 by Kucherlapati et al.

[0256] The antibodies of the present invention may be monospecific, bispecific, trispecific or of greater multispecificity. Multispecific antibodies may be specific for different epitopes of a polypeptide of the present invention or may be specific for both a polypeptide of the present invention as well as for a heterologous epitope, such as a heterologous polypeptide or solid support material. See, e.g., PCT publications WO 93/17715; WO 92/08802; WO 91/00360; WO 92/05793; Tutt, et al., J. Immunol. 147:60-69 (1991); U.S. Pat. Nos. 4,474,893; 4,714,681; 4,925,648; 5,573,920; 5,601,819; Kostelny et al., J. Immunol. 148:1547-1553 (1992).

[0257] Antibodies of the present invention may be described or specified in terms of the epitope(s) or portion(s) of a polypeptide of the present invention which they recognize or specifically bind. The epitope(s) or polypeptide portion(s) may be specified as described herein, e.g., by N-terminal and C-terminal positions, or by size in contiguous amino acid residues, or listed in the Tables and Figures. Preferred epitopes of the invention include the predicted epitopes shown in column 7 of Table 1A, as well as polynucleotides that encode these epitopes. Antibodies which specifically bind any epitope or polypeptide of the present invention may also be excluded. Therefore, the present invention includes antibodies that specifically bind polypeptides of the present invention, and allows for the exclusion of the same.

[0258] Antibodies of the present invention may also be described or specified in terms of their cross-reactivity. Antibodies that do not bind any other analog, ortholog, or homolog of a polypeptide of the present invention are included. Antibodies that bind polypeptides with at least 95%, at least 90%, at least 85%, at least 80%, at least 75%, at least 70%, at least 65%, at least 60%, at least 55%, and at least 50% identity (as calculated using methods known in the art and described herein) to a polypeptide of the present invention are also included in the present invention. In specific embodiments, antibodies of the present invention cross-react with murine, rat and/or rabbit homologs of human proteins and the corresponding epitopes thereof. Antibodies that do not bind polypeptides with less than 95%, less than 90%, less than 85%, less than 80%, less than 75%, less than 70%, less than 65%, less than 60%, less than 55%, and less than 50% identity (as calculated using methods known in the art and described herein) to a polypeptide of the present invention are also included in the present invention. In a specific embodiment, the above-described cross-reactivity is with respect to any single specific antigenic or immunogenic polypeptide, or combination(s) of 2, 3, 4, 5, or more of the specific antigenic and/or immunogenic polypeptides disclosed herein. Further included in the present invention are antibodies which bind polypeptides encoded by polynucleotides which hybridize to a polynucleotide of the present invention under stringent hybridization conditions (as described herein). Antibodies of the present invention may also be described or specified in terms of their binding affinity to a polypeptide of the invention. Preferred binding affinities include those with a dissociation constant or Kd less than 5×10⁻² M, 10⁻² M, 5×10⁻³ M, 10⁻³ M, 5×10⁻⁴ M, 10⁻⁴ M, 5×10⁻⁵ M, 10⁻⁵ M, 5×10⁻⁶ M, 10⁻⁶M, 5×10⁻⁷ M, 10⁻⁷ M, 5×10⁻⁸ M, 10⁻⁸ M, 5×10⁻⁹ M, 10⁻⁹ M, 5×10⁻¹⁰ M, 10⁻¹⁰ M, 5×10⁻¹¹ M, 10⁻¹¹ M, 5×10⁻¹², M, 10⁻¹² M, 5×10⁻¹³ M, 10⁻¹³ M, 5×10⁻¹⁴ M, 10⁻¹⁴ M, 5×10⁻¹⁵ M, or 10⁻¹⁵ M.

[0259] The invention also provides antibodies that competitively inhibit binding of an antibody to an epitope of the invention as determined by any method known in the art for determining competitive binding, for example, the immunoassays described herein. In preferred embodiments, the antibody competitively inhibits binding to the epitope by at least 95%, at least 90%, at least 85%, at least 80%, at least 75%, at least 70%, at least 60%, or at least 50%.

[0260] Antibodies of the present invention may act as agonists or antagonists of the polypeptides of the present invention. For example, the present invention includes antibodies which disrupt the receptor/ligand interactions with the polypeptides of the invention either partially or fully. Preferably, antibodies of the present invention bind an antigenic epitope disclosed herein, or a portion thereof. The invention features both receptor-specific antibodies and ligand-specific antibodies. The invention also features receptor-specific antibodies which do not prevent ligand binding but prevent receptor activation. Receptor activation (i.e., signaling) may be determined by techniques described herein or otherwise known in the art. For example, receptor activation can be determined by detecting the phosphorylation (e.g., tyrosine or serine/threonine) of the receptor or its substrate by immunoprecipitation followed by western blot analysis (for example, as described supra). In specific embodiments, antibodies are provided that inhibit ligand activity or receptor activity by at least 95%, at least 90%, at least 85%, at least 80%, at least 75%, at least 70%, at least 60%, or at least 50% of the activity in absence of the antibody.

[0261] The invention also features receptor-specific antibodies which both prevent ligand binding and receptor activation as well as antibodies that recognize the receptor-ligand complex, and, preferably, do not specifically recognize the unbound receptor or the unbound ligand. Likewise, included in the invention are neutralizing antibodies which bind the ligand and prevent binding of the ligand to the receptor, as well as antibodies which bind the ligand, thereby preventing receptor activation, but do not prevent the ligand from binding the receptor. Further included in the invention are antibodies which activate the receptor. These antibodies may act as receptor agonists, i.e., potentiate or activate either all or a subset of the biological activities of the ligand-mediated receptor activation, for example, by inducing dimerization of the receptor. The antibodies may be specified as agonists, antagonists or inverse agonists for biological activities comprising the specific biological activities of the peptides of the invention disclosed herein. The above antibody agonists can be made using methods known in the art. See, e.g., PCT publication WO 96/40281; U.S. Pat. No. 5,811,097; Deng et al., Blood 92(6):1981-1988 (1998); Chen et al., Cancer Res. 58(16):3668-3678 (1998); Harrop et al., J. Immunol. 161(4):1786-1794 (1998); Zhu et al., Cancer Res. 58(15):3209-3214 (1998); Yoon et al., J. Immunol. 160(7):3170-3179 (1998); Prat et al., J. Cell. Sci. 111(Pt2):237-247 (1998); Pitard et al., J. Immunol. Methods 205(2):177-190 (1997); Liautard et al., Cytokine 9(4):233-241 (1997); Carlson et al., J. Biol. Chem. 272(17):11295-11301 (1997); Taryman et al., Neuron 14(4):755-762 (1995); Muller et al., Structure 6(9):1153-1167 (1998); Bartunek et al., Cytokine 8(l):14-20 (1996) (which are all incorporated by reference herein in their entireties).

[0262] Antibodies of the present invention may be used, for example, to purify, detect, and target the polypeptides of the present invention, including both in vitro and in vivo diagnostic and therapeutic methods. For example, the antibodies have utility in immunoassays for qualitatively and quantitatively measuring levels of the polypeptides of the present invention in biological samples. See, e.g., Harlow et al., Antibodies: A Laboratory Manual, (Cold Spring Harbor Laboratory Press, 2nd ed. 1988); incorporated by reference herein in its entirety.

[0263] As discussed in more detail below, the antibodies of the present invention may be used either alone or in combination with other compositions. The antibodies may further be recombinantly fused to a heterologous polypeptide at the N- or C-terminus or chemically conjugated (including covalent and non-covalent conjugations) to polypeptides or other compositions. For example, antibodies of the present invention may be recombinantly fused or conjugated to molecules useful as labels in detection assays and effector molecules such as heterologous polypeptides, drugs, radionuclides, or toxins. See, e.g., PCT publications WO 92/08495; WO 91/14438; WO 89/12624; U.S. Pat. No. 5,314,995; and EP 396,387; the disclosures of which are incorporated herein by reference in their entireties.

[0264] The antibodies of the invention include derivatives that are modified, i.e, by the covalent attachment of any type of molecule to the antibody such that covalent attachment does not prevent the antibody from generating an anti-idiotypic response. For example, but not by way of limitation, the antibody derivatives include antibodies that have been modified, e.g., by glycosylation, acetylation, pegylation, phosphylation, amidation, derivatization by known protecting/blocking groups, proteolytic cleavage, linkage to a cellular ligand or other protein, etc. Any of numerous chemical modifications may be carried out by known techniques, including, but not limited to specific chemical cleavage, acetylation, formylation, metabolic synthesis of tunicamycin, etc. Additionally, the derivative may contain one or more non-classical amino acids.

[0265] The antibodies of the present invention may be generated by any suitable method known in the art. Polyclonal antibodies to an antigen-of-interest can be produced by various procedures well known in the art. For example, a polypeptide of the invention can be administered to various host animals including, but not limited to, rabbits, mice, rats, etc. to induce the production of sera containing polyclonal antibodies specific for the antigen. Various adjuvants may be used to increase the immunological response, depending on the host species, and include but are not limited to, Freund's (complete and incomplete), mineral gels such as aluminum hydroxide, surface active substances such as lysolecithin, pluronic polyols, polyanions, peptides, oil emulsions, keyhole limpet hemocyanins, dinitrophenol, and potentially useful human adjuvants such as BCG (bacille Calmette-Guerin) and corynebacterium parvum. Such adjuvants are also well known in the art.

[0266] Monoclonal antibodies can be prepared using a wide variety of techniques known in the art including the use of hybridoma, recombinant, and phage display technologies, or a combination thereof. For example, monoclonal antibodies can be produced using hybridoma techniques including those known in the art and taught, for example, in Harlow et al., Antibodies: A Laboratory Manual, (Cold Spring Harbor Laboratory Press, 2nd ed. 1988); Hammerling, et al., in: Monoclonal Antibodies and T-Cell Hybridomas 563-681 (Elsevier, N.Y., 1981) (said references incorporated by reference in their entireties). The term “monoclonal antibody” as used herein is not limited to antibodies produced through hybridoma technology. The term “monoclonal antibody” refers to an antibody that is derived from a single clone, including any eukaryotic, prokaryotic, or phage clone, and not the method by which it is produced.

[0267] Methods for producing and screening for specific antibodies using hybridoma technology are routine and well known in the art and are discussed in detail in the Examples. In a non-limiting example, mice can be immunized with a polypeptide of the invention or a cell expressing such peptide. Once an immune response is detected, e.g., antibodies specific for the antigen are detected in the mouse serum, the mouse spleen is harvested and splenocytes isolated. The splenocytes are then fused by well known techniques to any suitable myeloma cells, for example cells from cell line SP20 available from the ATCC. Hybridomas are selected and cloned by limited dilution. The hybridoma clones are then assayed by methods known in the art for cells that secrete antibodies capable of binding a polypeptide of the invention. Ascites fluid, which generally contains high levels of antibodies, can be generated by immunizing mice with positive hybridoma clones.

[0268] Accordingly, the present invention provides methods of generating monoclonal antibodies as well as antibodies produced by the method comprising culturing a hybridoma cell secreting an antibody of the invention wherein, preferably, the hybridoma is generated by fusing splenocytes isolated from a mouse immunized with an antigen of the invention with myeloma cells and then screening the hybridomas resulting from the fusion for hybridoma clones that secrete an antibody able to bind a polypeptide of the invention.

[0269] Another well known method for producing both polyclonal and monoclonal human B cell lines is transformation using Epstein Barr Virus (EBV). Protocols for generating EBV-transformed B cell lines are commonly known in the art, such as, for example, the protocol outlined in Chapter 7.22 of Current Protocols in Immunology, Coligan et al., Eds., 1994, John Wiley & Sons, NY, which is hereby incorporated in its entirety by reference. The source of B cells for transformation is commonly human peripheral blood, but B cells for transformation may also be derived from other sources including, but not limited to, lymph nodes, tonsil, spleen, tumor tissue, and infected tissues. Tissues are generally made into single cell suspensions prior to EBV transformation. Additionally, steps may be taken to either physically remove or inactivate T cells (e.g., by treatment with cyclosporin A) in B cell-containing samples, because T cells from individuals seropositive for anti-EBV antibodies can suppress B cell immortalization by EBV.

[0270] In general, the sample containing human B cells is innoculated with EBV, and cultured for 3-4 weeks. A typical source of EBV is the culture supernatant of the B95-8 cell line (ATCC #VR-1492). Physical signs of EBV transformation can generally be seen towards the end of the 3-4 week culture period. By phase-contrast microscopy, transformed cells may appear large, clear, hairy and tend to aggregate in tight clusters of cells. Initially, EBV lines are generally polyclonal. However, over prolonged periods of cell cultures, EBV lines may become monoclonal or polyclonal as a result of the selective outgrowth of particular B cell clones. Alternatively, polyclonal EBV transformed lines may be subcloned (e.g., by limiting dilution culture) or fused with a suitable fusion partner and plated at limiting dilution to obtain monoclonal B cell lines. Suitable fusion partners for EBV transformed cell lines include mouse myeloma cell lines (e.g., SP2/0,×63-Ag8.653), heteromyeloma cell lines (human x mouse; e.g, SPAM-8, SBC-H20, and CB-F7), and human cell lines (e.g., GM 1500, SKO-007, RPMI 8226, and KR-4). Thus, the present invention also provides a method of generating polyclonal or monoclonal human antibodies against polypeptides of the invention or fragments thereof, comprising EBV-transformation of human B cells.

[0271] Antibody fragments which recognize specific epitopes may be generated by known techniques. For example, Fab and F(ab′)2 fragments of the invention may be produced by proteolytic cleavage of immunoglobulin molecules, using enzymes such as papain (to produce Fab fragments) or pepsin (to produce F(ab′)2 fragments). F(ab′)2 fragments contain the variable region, the light chain constant region and the CHI domain of the heavy chain.

[0272] For example, the antibodies of the present invention can also be generated using various phage display methods known in the art. In phage display methods, functional antibody domains are displayed on the surface of phage particles which carry the polynucleotide sequences encoding them. In a particular embodiment, such phage can be utilized to display antigen binding domains expressed from a repertoire or combinatorial antibody library (e.g., human or murine). Phage expressing an antigen binding domain that binds the antigen of interest can be selected or identified with antigen, e.g., using labeled antigen or antigen bound or captured to a solid surface or bead. Phage used in these methods are typically filamentous phage including fd and M13 binding domains expressed from phage with Fab, Fv or disulfide stabilized Fv antibody domains recombinantly fused to either the phage gene III or gene VIII protein. Examples of phage display methods that can be used to make the antibodies of the present invention include those disclosed in Brinkman et al., J. Immunol. Methods 182:41-50 (1995); Ames et al., J. Immunol. Methods 184:177-186 (1995); Kettleborough et al., Eur. J. Immunol. 24:952-958 (1994); Persic et al., Gene 187 9-18 (1997); Burton et al., Advances in Immunology 57:191-280 (1994); PCT application No. PCT/GB91/01134; PCT publications WO 90/02809; WO 91/10737; WO 92/01047; WO 92/18619; WO 93/11236; WO 95/15982; WO 95/20401; and U.S. Pat. Nos. 5,698,426; 5,223,409; 5,403,484; 5,580,717; 5,427,908; 5,750,753; 5,821,047; 5,571,698; 5,427,908; 5,516,637; 5,780,225; 5,658,727; 5,733,743 and 5,969,108; each of which is incorporated herein by reference in its entirety.

[0273] As described in the above references, after phage selection, the antibody coding regions from the phage can be isolated and used to generate whole antibodies, including human antibodies, or any other desired antigen binding fragment, and expressed in any desired host, including mammalian cells, insect cells, plant cells, yeast, and bacteria, e.g., as described in detail below. For example, techniques to recombinantly produce Fab, Fab′ and F(ab′)2 fragments can also be employed using methods known in the art such as those disclosed in PCT publication WO 92/22324; Mullinax et al., BioTechniques 12(6):864-869 (1992); and Sawai et al., AJRI 34:26-34 (1995); and Better et al., Science 240:1041-1043 (1988) (said references incorporated by reference in their entireties).

[0274] Examples of techniques which can be used to produce single-chain Fvs and antibodies include those described in U.S. Patents 4,946,778 and 5,258,498; Huston et al., Methods in Enzymology 203:46-88 (1991); Shu et al., PNAS 90:7995-7999 (1993); and Skerra et al., Science 240:1038-1040 (1988). For some uses, including in vivo use of antibodies in humans and in vitro detection assays, it may be preferable to use chimeric, humanized, or human antibodies. A chimeric antibody is a molecule in which different portions of the antibody are derived from different animal species, such as antibodies having a variable region derived from a murine monoclonal antibody and a human immunoglobulin constant region. Methods for producing chimeric antibodies are known in the art. See e.g., Morrison, Science 229:1202 (1985); Oi et al., BioTechniques 4:214 (1986); Gillies et al., (1989) J. Immunol. Methods 125:191-202; U.S. Pat. Nos. 5,807,715; 4,816,567; and 4,816,397, which are incorporated herein by reference in their entirety. Humanized antibodies are antibody molecules from non-human species antibody that binds the desired antigen having one or more complementarity determining regions (CDRs) from the non-human species and a framework regions from a human immunoglobulin molecule. Often, framework residues in the human framework regions will be substituted with the corresponding residue from the CDR donor antibody to alter, preferably improve, antigen binding. These framework substitutions are identified by methods well known in the art, e.g., by modeling of the interactions of the CDR and framework residues to identify framework residues important for antigen binding and sequence comparison to identify unusual framework residues at particular positions. (See, e.g., Queen et al., U.S. Pat. No. 5,585,089; Riechmann et al., Nature 332:323 (1988), which are incorporated herein by reference in their entireties.) Antibodies can be humanized using a variety of techniques known in the art including, for example, CDR-grafting (EP 239,400; PCT publication WO 91/09967; U.S. Pat. Nos. 5,225,539; 5,530,101; and 5,585,089), veneering or resurfacing (EP 592,106; EP 519,596; Padlan, Molecular Immunology 28(4/5):489-498 (1991); Studnicka et al., Protein Engineering 7(6):805-814 (1994); Roguska. et al., PNAS 91:969-973 (1994)), and chain shuffling (U.S. Pat. No. 5,565,332).

[0275] Completely human antibodies are particularly desirable for therapeutic treatment of human patients. Human antibodies can be made by a variety of methods known in the art including phage display methods described above using antibody libraries derived from human immunoglobulin sequences. See also, U.S. Pat. Nos. 4,444,887 and 4,716,111; and PCT publications WO 98/46645, WO 98/50433, WO 98/24893, WO 98/16654, WO 96/34096, WO 96/33735, and WO 91/10741; each of which is incorporated herein by reference in its entirety.

[0276] Human antibodies can also be produced using transgenic mice which are incapable of expressing functional endogenous immunoglobulins, but which can express human immunoglobulin genes. For example, the human heavy and light chain immunoglobulin gene complexes may be introduced randomly or by homologous recombination into mouse embryonic stem cells. Alternatively, the human variable region, constant region, and diversity region may be introduced into mouse embryonic stem cells in addition to the human heavy and light chain genes. The mouse heavy and light chain immunoglobulin genes may be rendered non-functional separately or simultaneously with the introduction of human immunoglobulin loci by homologous recombination. In particular, homozygous deletion of the JH region prevents endogenous antibody production. The modified embryonic stem cells are expanded and microinjected into blastocysts to produce chimeric mice. The chimeric mice are then bred to produce homozygous offspring which express human antibodies. The transgenic mice are immunized in the normal fashion with a selected antigen, e.g., all or a portion of a polypeptide of the invention. Monoclonal antibodies directed against the antigen can be obtained from the immunized, transgenic mice using conventional hybridoma technology. The human immunoglobulin transgenes harbored by the transgenic mice rearrange during B cell differentiation, and subsequently undergo class switching and somatic mutation. Thus, using such a technique, it is possible to produce therapeutically useful IgG, IgA, IgM and IgE antibodies. For an overview of this technology for producing human antibodies, see Lonberg and Huszar, Int. Rev. Immunol. 13:65-93 (1995). For a detailed discussion of this technology for producing human antibodies and human monoclonal antibodies and protocols for producing such antibodies, see, e.g., PCT publications WO 98/24893; WO 92/01047; WO 96/34096; WO 96/33735; European Patent No. 0 598 877; U.S. Pat. Nos. 5,413,923; 5,625,126; 5,633,425; 5,569,825; 5,661,016; 5,545,806; 5,814,318; 5,885,793; 5,916,771; 5,939,598; 6,075,181; and 6,114,598, which are incorporated by reference herein in their entirety. In addition, companies such as Abgenix, Inc. (Freemont, Calif.) and Genpharm (San Jose, Calif.) can be engaged to provide human antibodies directed against a selected antigen using technology similar to that described above.

[0277] Completely human antibodies which recognize a selected epitope can be generated using a technique referred to as “guided selection.” In this approach a selected non-human monoclonal antibody, e.g., a mouse antibody, is used to guide the selection of a completely human antibody recognizing the same epitope. (Jespers et al., Bio/technology 12:899-903 (1988)).

[0278] Further, antibodies to the polypeptides of the invention can, in turn, be utilized to generate anti-idiotype antibodies that “mimic” polypeptides of the invention using techniques well known to those skilled in the art. (See, e.g., Greenspan & Bona, FASEB J. 7(5):437-444; (1989) and Nissinoff, J. Immunol. 147(8):2429-2438 (1991)). For example, antibodies which bind to and competitively inhibit polypeptide multimerization and/or binding of a polypeptide of the invention to a ligand can be used to generate anti-idiotypes that “mimic” the polypeptide multimerization and/or binding domain and, as a consequence, bind to and neutralize polypeptide and/or its ligand. Such neutralizing anti-idiotypes or Fab fragments of such anti-idiotypes can be used in therapeutic regimens to neutralize polypeptide ligand(s)/receptor(s). For example, such anti-idiotypic antibodies can be used to bind a polypeptide of the invention and/or to bind its ligand(s)/receptor(s), and thereby block its biological activity. Alternatively, antibodies which bind to and enhance polypeptide multimerization and/or binding, and/or receptor/ligand multimerization, binding and/or signaling can be used to generate anti-idiotypes that function as agonists of a polypeptide of the invention and/or its ligand/receptor. Such agonistic anti-idiotypes or Fab fragments of such anti-idiotypes can be used in therapeutic regimens as agonists of the polypeptides of the invention or its ligand(s)/receptor(s). For example, such anti-idiotypic antibodies can be used to bind a polypeptide of the invention and/or to bind its ligand(s)/receptor(s), and thereby promote or enhance its biological activity.

[0279] Intrabodies of the invention can be produced using methods known in the art, such as those disclosed and reviewed in Chen et al., Hum. Gene Ther. 5:595-601 (1994); Marasco, W.A., Gene Ther. 4:11-15 (1997); Rondon and Marasco, Annu. Rev. Microbiol. 51:257-283 (1997); Proba et al., J. Mol. Biol. 275:245-253 (1998); Cohen et al., Oncogene 17:2445-2456 (1998); Ohage and Steipe, J. Mol. Biol. 291:1119-1128 (1999); Ohage et al., J. Mol. Biol. 291:1129-1134 (1999); Wirtz and Steipe, Protein Sci. 8:2245-2250 (1999); Zhu et al., J. Immunol. Methods 231:207-222 (1999); and references cited therein.

[0280] Polynucleotides Encoding Antibodies

[0281] The invention further provides polynucleotides comprising a nucleotide sequence encoding an antibody of the invention and fragments thereof. The invention also encompasses polynucleotides that hybridize under stringent or alternatively, under lower stringency hybridization conditions, e.g., as defined supra, to polynucleotides that encode an antibody, preferably, that specifically binds to a polypeptide of the invention, preferably, an antibody that binds to a polypeptide having the amino acid sequence of SEQ ID NO:Y, to a polypeptide encoded by a portion of SEQ ID NO:X as defined in columns 8 and 9 of Table 2, and/or to a polypeptide encoded by the cDNA contained in Clone ID NO:Z.

[0282] The polynucleotides may be obtained, and the nucleotide sequence of the polynucleotides determined, by any method known in the art. For example, if the nucleotide sequence of the antibody is known, a polynucleotide encoding the antibody may be assembled from chemically synthesized oligonucleotides (e.g., as described in Kutmeier et al., BioTechniques 17:242 (1994)), which, briefly, involves the synthesis of overlapping oligonucleotides containing portions of the sequence encoding the antibody, annealing and ligating of those oligonucleotides, and then amplification of the ligated oligonucleotides by PCR.

[0283] Alternatively, a polynucleotide encoding an antibody may be generated from nucleic acid from a suitable source. If a clone containing a nucleic acid encoding a particular antibody is not available, but the sequence of the antibody molecule is known, a nucleic acid encoding the immunoglobulin may be chemically synthesized or obtained from a suitable source (e.g., an antibody cDNA library, or a cDNA library generated from, or nucleic acid, preferably poly A+ RNA, isolated from, any tissue or cells expressing the antibody, such as hybridoma cells selected to express an antibody of the invention) by PCR amplification using synthetic primers hybridizable to the 3′ and 5′ ends of the sequence or by cloning using an oligonucleotide probe specific for the particular gene sequence to identify, e.g., a cDNA clone from a cDNA library that encodes the antibody. Amplified nucleic acids generated by PCR may then be cloned into replicable cloning vectors using any method well known in the art.

[0284] Once the nucleotide sequence and corresponding amino acid sequence of the antibody is determined, the nucleotide sequence of the antibody may be manipulated using methods well known in the art for the manipulation of nucleotide sequences, e.g., recombinant DNA techniques, site directed mutagenesis, PCR, etc. (see, for example, the techniques described in Sambrook et al., 1990, Molecular Cloning, A Laboratory Manual, 2d Ed., Cold Spring Harbor Laboratory, Cold Spring Harbor, N.Y. and Ausubel et al., eds., 1998, Current Protocols in Molecular Biology, John Wiley & Sons, NY, which are both incorporated by reference herein in their entireties), to generate antibodies having a different amino acid sequence, for example to create amino acid substitutions, deletions, and/or insertions.

[0285] In a specific embodiment, the amino acid sequence of the heavy and/or light chain variable domains may be inspected to identify the sequences of the complementarity determining regions (CDRs) by methods that are well know in the art, e.g., by comparison to known amino acid sequences of other heavy and light chain variable regions to determine the regions of sequence hypervariability. Using routine recombinant DNA techniques, one or more of the CDRs may be inserted within framework regions, e.g., into human framework regions to humanize a non-human antibody, as described supra. The framework regions may be naturally occurring or consensus framework regions, and preferably human framework regions (see, e.g., Chothia et al., J. Mol. Biol. 278: 457-479 (1998) for a listing of human framework regions). Preferably, the polynucleotide generated by the combination of the framework regions and CDRs encodes an antibody that specifically binds a polypeptide of the invention. Preferably, as discussed supra, one or more amino acid substitutions may be made within the framework regions, and, preferably, the amino acid substitutions improve binding of the antibody to its antigen. Additionally, such methods may be used to make amino acid substitutions or deletions of one or more variable region cysteine residues participating in an intrachain disulfide bond to generate antibody molecules lacking one or more intrachain disulfide bonds. Other alterations to the polynucleotide are encompassed by the present invention and within the skill of the art.

[0286] In addition, techniques developed for the production of “chimeric antibodies” (Morrison et al., Proc. Natl. Acad. Sci. 81:851-855 (1984); Neuberger et al., Nature 312:604-608 (1984); Takeda et al., Nature 314:452-454 (1985)) by splicing genes from a mouse antibody molecule of appropriate antigen specificity together with genes from a human antibody molecule of appropriate biological activity can be used. As described supra, a chimeric antibody is a molecule in which different portions are derived from different animal species, such as those having a variable region derived from a murine mAb and a human immunoglobulin constant region, e.g., humanized antibodies.

[0287] Alternatively, techniques described for the production of single chain antibodies (U.S. Pat. No. 4,946,778; Bird, Science 242:423-42 (1988); Huston et al., Proc. Natl. Acad. Sci. USA 85:5879-5883 (1988); and Ward et al., Nature 334:544-54 (1989)) can be adapted to produce single chain antibodies. Single chain antibodies are formed by linking the heavy and light chain fragments of the Fv region via an amino acid bridge, resulting in a single chain polypeptide. Techniques for the assembly of functional Fv fragments in E. coli may also be used (Skerra et al., Science 242:1038-1041 (1988)).

[0288] Methods of Producing Antibodies

[0289] The antibodies of the invention can be produced by any method known in the art for the synthesis of antibodies, in particular, by chemical synthesis or preferably, by recombinant expression techniques. Methods of producing antibodies include, but are not limited to, hybridoma technology, EBV transformation, and other methods discussed herein as well as through the use recombinant DNA technology, as discussed below.

[0290] Recombinant expression of an antibody of the invention, or fragment, derivative or analog thereof, (e.g., a heavy or light chain of an antibody of the invention or a single chain antibody of the invention), requires construction of an expression vector containing a polynucleotide that encodes the antibody. Once a polynucleotide encoding an antibody molecule or a heavy or light chain of an antibody, or portion thereof (preferably containing the heavy or light chain variable domain), of the invention has been obtained, the vector for the production of the antibody molecule may be produced by recombinant DNA technology using techniques well known in the art. Thus, methods for preparing a protein by expressing a polynucleotide containing an antibody encoding nucleotide sequence are described herein. Methods which are well known to those skilled in the art can be used to construct expression vectors containing antibody coding sequences and appropriate transcriptional and translational control signals. These methods include, for example, in vitro recombinant DNA techniques, synthetic techniques, and in vivo genetic recombination. The invention, thus, provides replicable vectors comprising a nucleotide sequence encoding an antibody molecule of the invention, or a heavy or light chain thereof, or a heavy or light chain variable domain, operably linked to a promoter. Such vectors may include the nucleotide sequence encoding the constant region of the antibody molecule (see, e.g., PCT Publication WO 86/05807; PCT Publication WO 89/01036; and U.S. Pat. No. 5,122,464) and the variable domain of the antibody may be cloned into such a vector for expression of the entire heavy or light chain.

[0291] The expression vector is transferred to a host cell by conventional techniques and the transfected cells are then cultured by conventional techniques to produce an antibody of the invention. Thus, the invention includes host cells containing a polynucleotide encoding an antibody of the invention, or a heavy or light chain thereof, or a single chain antibody of the invention, operably linked to a heterologous promoter. In preferred embodiments for the expression of double-chained antibodies, vectors encoding both the heavy and light chains may be co-expressed in the host cell for expression of the entire immunoglobulin molecule, as detailed below.

[0292] A variety of host-expression vector systems may be utilized to express the antibody molecules of the invention. Such host-expression systems represent vehicles by which the coding sequences of interest may be produced and subsequently purified, but also represent cells which may, when transformed or transfected with the appropriate nucleotide coding sequences, express an antibody molecule of the invention in situ. These include but are not limited to microorganisms such as bacteria (e.g., E. coli, B. subtilis) transformed with recombinant bacteriophage DNA, plasmid DNA or cosmid DNA expression vectors containing antibody coding sequences; yeast (e.g., Saccharomyces, Pichia) transformed with recombinant yeast expression vectors containing antibody coding sequences; insect cell systems infected with recombinant virus expression vectors (e.g., baculovirus) containing antibody coding sequences; plant cell systems infected with recombinant virus expression vectors (e.g., cauliflower mosaic virus, CaMV; tobacco mosaic virus, TMV) or transformed with recombinant plasmid expression vectors (e.g., Ti plasmid) containing antibody coding sequences; or mammalian cell systems (e.g., COS, CHO, BHK, 293, 3T3 cells) harboring recombinant expression constructs containing promoters derived from the genome of mammalian cells (e.g., metallothionein promoter) or from mammalian viruses (e.g., the adenovirus late promoter; the vaccinia virus 7.5K promoter). Preferably, bacterial cells such as Escherichia coli, and more preferably, eukaryotic cells, especially for the expression of whole recombinant antibody molecule, are used for the expression of a recombinant antibody molecule. For example, mammalian cells such as Chinese hamster ovary cells (CHO), in conjunction with a vector such as the major intermediate early gene promoter element from human cytomegalovirus is an effective expression system for antibodies (Foecking et al., Gene 45:101 (1986); Cockett et al., Bio/Technology 8:2 (1990)).

[0293] In bacterial systems, a number of expression vectors may be advantageously selected depending upon the use intended for the antibody molecule being expressed. For example, when a large quantity of such a protein is to be produced, for the generation of pharmaceutical compositions of an antibody molecule, vectors which direct the expression of high levels of fusion protein products that are readily purified may be desirable. Such vectors include, but are not limited, to the E. coli expression vector pUR278 (Ruther et al., EMBO J. 2:1791 (1983)), in which the antibody coding sequence may be ligated individually into the vector in frame with the lac Z coding region so that a fusion protein is produced; pIN vectors (Inouye & Inouye, Nucleic Acids Res. 13:3101-3109 (1985); Van Heeke & Schuster, J. Biol. Chem. 24:5503-5509 (1989)); and the like. pGEX vectors may also be used to express foreign polypeptides as fusion proteins with glutathione S-transferase (GST). In general, such fusion proteins are soluble and can easily be purified from lysed cells by adsorption and binding to matrix glutathione-agarose beads followed by elution in the presence of free glutathione. The pGEX vectors are designed to include thrombin or factor Xa protease cleavage sites so that the cloned target gene product can be released from the GST moiety.

[0294] In an insect system, Autographa californica nuclear polyhedrosis virus (AcNPV) is used as a vector to express foreign genes. The virus grows in Spodoptera frugiperda cells. The antibody coding sequence may be cloned individually into non-essential regions (for example the polyhedrin gene) of the virus and placed under control of an AcNPV promoter (for example the polyhedrin promoter).

[0295] In mammalian host cells, a number of viral-based expression systems may be utilized. In cases where an adenovirus is used as an expression vector, the antibody coding sequence of interest may be ligated to an adenovirus transcription/translation control complex, e.g., the late promoter and tripartite leader sequence. This chimeric gene may then be inserted in the adenovirus genome by in vitro or in vivo recombination. Insertion in a non-essential region of the viral genome (e.g., region E1 or E3) will result in a recombinant virus that is viable and capable of expressing the antibody molecule in infected hosts. (e.g., see Logan & Shenk, Proc. Natl. Acad. Sci. USA 81:355-359 (1984)). Specific initiation signals may also be required for efficient translation of inserted antibody coding sequences. These signals include the ATG initiation codon and adjacent sequences. Furthermore, the initiation codon must be in phase with the reading frame of the desired coding sequence to ensure translation of the entire insert. These exogenous translational control signals and initiation codons can be of a variety of origins, both natural and synthetic. The efficiency of expression may be enhanced by the inclusion of appropriate transcription enhancer elements, transcription terminators, etc. (see Bittner et al., Methods in Enzymol. 153:51-544 (1987)).

[0296] In addition, a host cell strain may be chosen which modulates the expression of the inserted sequences, or modifies and processes the gene product in the specific fashion desired. Such modifications (e.g., glycosylation) and processing (e.g., cleavage) of protein products may be important for the function of the protein. Different host cells have characteristic and specific mechanisms for the post-translational processing and modification of proteins and gene products. Appropriate cell lines or host systems can be chosen to ensure the correct modification and processing of the foreign protein expressed. To this end, eukaryotic host cells which possess the cellular machinery for proper processing of the primary transcript, glycosylation, and phosphorylation of the gene product may be used. Such mammalian host cells include but are not limited to CHO, VERY, BHK, Hela, COS, MDCK, 293, 3T3, W138, and in particular, breast cancer cell lines such as, for example, BT483, Hs578T, HTB2, BT20 and T47D, and normal mammary gland cell line such as, for example, CRL7030 and Hs578Bst.

[0297] For long-term, high-yield production of recombinant proteins, stable expression is preferred. For example, cell lines which stably express the antibody molecule may be engineered. Rather than using expression vectors which contain viral origins of replication, host cells can be transformed with DNA controlled by appropriate expression control elements (e.g., promoter, enhancer, sequences, transcription terminators, polyadenylation sites, etc.), and a selectable marker. Following the introduction of the foreign DNA, engineered cells may be allowed to grow for 1-2 days in an enriched media, and then are switched to a selective media. The selectable marker in the recombinant plasmid confers resistance to the selection and allows cells to stably integrate the plasmid into their chromosomes and grow to form foci which in turn can be cloned and expanded into cell lines. This method may advantageously be used to engineer cell lines which express the antibody molecule. Such engineered cell lines may be particularly useful in screening and evaluation of compounds that interact directly or indirectly with the antibody molecule.

[0298] A number of selection systems may be used, including but not limited to the herpes simplex virus thymidine kinase (Wigler et al., Cell 11:223 (1977)), hypoxanthine-guanine phosphoribosyltransferase (Szybalska & Szybalski, Proc. Natl. Acad. Sci. USA 48:202 (1992)), and adenine phosphoribosyltransferase (Lowy et al., Cell 22:817 (1980)) genes can be employed in tk-, hgprt- or aprt-cells, respectively. Also, antimetabolite resistance can be used as the basis of selection for the following genes: dhfr, which confers resistance to methotrexate (Wigler et al., Natl. Acad. Sci. USA 77:357 (1980); O'Hare et al., Proc. Natl. Acad. Sci. USA 78:1527 (1981)); gpt, which confers resistance to mycophenolic acid (Mulligan & Berg, Proc. Natl. Acad. Sci. USA 78:2072 (1981)); neo, which confers resistance to the aminoglycoside G-418 Clinical Pharmacy 12:488-505; Wu and Wu, Biotherapy 3:87-95 (1991); Tolstoshev, Ann. Rev. Pharmacol. Toxicol. 32:573-596 (1993); Mulligan, Science 260:926-932 (1993); and Morgan and Anderson, Ann. Rev. Biochem. 62:191-217 (1993); May, 1993, TIB TECH 11(5):155-215 (1993)); and hygro, which confers resistance to hygromycin (Santerre et al., Gene 30:147 (1984)). Methods commonly known in the art of recombinant DNA technology may be routinely applied to select the desired recombinant clone, and such methods are described, for example, in Ausubel et al. (eds.), Current Protocols in Molecular Biology, John Wiley & Sons, NY (1993); Kriegler, Gene Transfer and Expression, A Laboratory Manual, Stockton Press, NY (1990); and in Chapters 12 and 13, Dracopoli et al. (eds), Current Protocols in Human Genetics, John Wiley & Sons, NY (1994); Colberre-Garapin et al., J. Mol. Biol. 150:1 (1981), which are incorporated by reference herein in their entireties.

[0299] The expression levels of an antibody molecule can be increased by vector amplification (for a review, see Bebbington and Hentschel, The use of vectors based on gene amplification for the expression of cloned genes in mammalian cells in DNA cloning, Vol.3. (Academic Press, New York, 1987)). When a marker in the vector system expressing antibody is ampliflable, increase in the level of inhibitor present in culture of host cell will increase the number of copies of the marker gene. Since the amplified region is associated with the antibody gene, production of the antibody will also increase (Crouse et al., Mol. Cell. Biol. 3:257 (1983)).

[0300] Vectors which use glutamine synthase (GS) or DHFR as the selectable markers can be amplified in the presence of the drugs methionine sulphoximine or methotrexate, respectively. An advantage of glutamine synthase based vectors are the availabilty of cell lines (e.g., the murine myeloma cell line, NSO) which are glutamine synthase negative. Glutamine synthase expression systems can also function in glutamine synthase expressing cells (e.g. Chinese Hamster Ovary (CHO) cells) by providing additional inhibitor to prevent the functioning of the endogenous gene. A glutamine synthase expression system and components thereof are detailed in PCT publications: WO87/04462; WO86/05807; WO89/01036; WO89/10404; and WO91/06657 which are incorporated in their entireties by reference herein. Additionally, glutamine synthase expression vectors that may be used according to the present invention are commercially available from suplliers, including, for example Lonza Biologics, Inc. (Portsmouth, N.H.). Expression and production of monoclonal antibodies using a GS expression system in murine myeloma cells is described in Bebbington et al., Bio/technology 10:169(1992) and in Biblia and Robinson Biotechnol. Prog. 11:1 (1995) which are incorporated in their entirities by reference herein.

[0301] The host cell may be co-transfected with two expression vectors of the invention, the first vector encoding a heavy chain derived polypeptide and the second vector encoding a light chain derived polypeptide. The two vectors may contain identical selectable markers which enable equal expression of heavy and light chain polypeptides. Alternatively, a single vector may be used which encodes, and is capable of expressing, both heavy and light chain polypeptides. In such situations, the light chain should be placed before the heavy chain to avoid an excess of toxic free heavy chain (Proudfoot, Nature 322:52 (1986); Kohler, Proc. Natl. Acad. Sci. USA 77:2197 (1980)). The coding sequences for the heavy and light chains may comprise cDNA or genomic DNA.

[0302] Once an antibody molecule of the invention has been produced by an animal, chemically synthesized, or recombinantly expressed, it may be purified by any method known in the art for purification of an immunoglobulin molecule, for example, by chromatography (e.g., ion exchange, affinity, particularly by affinity for the specific antigen after Protein A, and sizing column chromatography), centrifugation, differential solubility, or by any other standard technique for the purification of proteins. In addition, the antibodies of the present invention or fragments thereof can be fused to heterologous polypeptide sequences described herein or otherwise known in the art, to facilitate purification.

[0303] The present invention encompasses antibodies recombinantly fused or chemically conjugated (including both covalently and non-covalently conjugations) to a polypeptide (or portion thereof, preferably at least 10, 20, 30, 40, 50, 60, 70, 80, 90 or 100 amino acids of the polypeptide) of the present invention to generate fusion proteins. The fusion does not necessarily need to be direct, but may occur through linker sequences. The antibodies may be specific for antigens other than polypeptides (or portion thereof, preferably at least 10, 20, 30, 40, 50, 60, 70, 80, 90 or 100 amino acids of the polypeptide) of the present invention. For example, antibodies may be used to target the polypeptides of the present invention to particular cell types, either in vitro or in vivo, by fusing or conjugating the polypeptides of the present invention to antibodies specific for particular cell surface receptors. Antibodies fused or conjugated to the polypeptides of the present invention may also be used in in vitro immunoassays and purification methods using methods known in the art. See e.g., Harbor et al., supra, and PCT publication WO 93/21232; EP 439,095; Naramura et al., Immunol. Lett. 39:91-99 (1994); U.S. Pat. No. 5,474,981; Gillies et al., PNAS 89:1428-1432 (1992); Fell et al., J. Immunol. 146:2446-2452 (1991), which are incorporated by reference in their entireties.

[0304] The present invention further includes compositions comprising the polypeptides of the present invention fused or conjugated to antibody domains other than the variable regions. For example, the polypeptides of the present invention may be fused or conjugated to an antibody Fc region, or portion thereof. The antibody portion fused to a polypeptide of the present invention may comprise the constant region, hinge region, CH1 domain, CH2 domain, and CH3 domain or any combination of whole domains or portions thereof. The polypeptides may also be fused or conjugated to the above antibody portions to form multimers. For example, Fc portions fused to the polypeptides of the present invention can form dimers through disulfide bonding between the Fc portions. Higher multimeric forms can be made by fusing the polypeptides to portions of IgA and IgM. Methods for fusing or conjugating the polypeptides of the present invention to antibody portions are known in the art. See, e.g., U.S. Pat. Nos. 5,336,603; 5,622,929; 5,359,046; 5,349,053; 5,447,851; 5,112,946; EP 307,434; EP 367,166; PCT publications WO 96/04388; WO 91/06570; Ashkenazi et al., Proc. Natl. Acad. Sci. USA 88:10535-10539 (1991); Zheng et al., J. Immunol. 154:5590-5600 (1995); and Vil et al., Proc. Natl. Acad. Sci. USA 89:11337-11341 (1992) (said references incorporated by reference in their entireties).

[0305] As discussed, supra, the polypeptides corresponding to a polypeptide, polypeptide fragment, or a variant of SEQ ID NO:Y may be fused or conjugated to the above antibody portions to increase the in vivo half life of the polypeptides or for use in immunoassays using methods known in the art. Further, the polypeptides corresponding to SEQ ID NO:Y may be fused or conjugated to the above antibody portions to facilitate purification. One reported example describes chimeric proteins consisting of the first two domains of the human CD4-polypeptide and various domains of the constant regions of the heavy or light chains of mammalian immunoglobulins. See EP 394,827; and Traunecker et al., Nature 331:84-86 (1988). The polypeptides of the present invention fused or conjugated to an antibody having disulfide-linked dimeric structures (due to the IgG) may also be more efficient in binding and neutralizing other molecules, than the monomeric secreted protein or protein fragment alone. See, for example, Fountoulakis et al., J. Biochem. 270:3958-3964 (1995). In many cases, the Fc part in a fusion protein is beneficial in therapy and diagnosis, and thus can result in, for example, improved pharmacokinetic properties. See, for example, EP A 232,262. Alternatively, deleting the Fc part after the fusion protein has been expressed, detected, and purified, would be desired. For example, the Fc portion may hinder therapy and diagnosis if the fusion protein is used as an antigen for immunizations. In drug discovery, for example, human proteins, such as hIL-5, have been fused with Fc portions for the purpose of high-throughput screening assays to identify antagonists of hIL-5. (See, Bennett et al., J. Molecular Recognition 8:52-58 (1995); Johanson et al., J. Biol. Chem. 270:9459-9471 (1995)).

[0306] Moreover, the antibodies or fragments thereof of the present invention can be fused to marker sequences, such as a peptide to facilitate purification. In preferred embodiments, the marker amino acid sequence is a hexa-histidine peptide, such as the tag provided in a pQE vector (QIAGEN, Inc., 9259 Eton Avenue, Chatsworth, Calif., 91311), among others, many of which are commercially available. As described in Gentz et al., Proc. Natl. Acad. Sci. USA 86:821-824 (1989), for instance, hexa-histidine provides for convenient purification of the fusion protein. Other peptide tags useful for purification include, but are not limited to, the “HA” tag, which corresponds to an epitope derived from the influenza hemagglutinin protein (Wilson et al., Cell 37:767 (1984)) and the “flag” tag.

[0307] The present invention further encompasses antibodies or fragments thereof conjugated to a diagnostic or therapeutic agent. The antibodies can be used diagnostically to, for example, monitor the development or progression of a tumor as part of a clinical testing procedure to, e.g., determine the efficacy of a given treatment regimen. Detection can be facilitated by coupling the antibody to a detectable substance. Examples of detectable substances include various enzymes, prosthetic groups, fluorescent materials, luminescent materials, bioluminescent materials, radioactive materials, positron emitting metals using various positron emission tomographies, and nonradioactive paramagnetic metal ions. The detectable substance may be coupled or conjugated either directly to the antibody (or fragment thereof) or indirectly, through an intermediate (such as, for example, a linker known in the art) using techniques known in the art. See, for example, U.S. Pat. No. 4,741,900 for metal ions which can be conjugated to antibodies for use as diagnostics according to the present invention. Examples of suitable enzymes include horseradish peroxidase, alkaline phosphatase, beta-galactosidase, or acetylcholinesterase; examples of suitable prosthetic group complexes include streptavidin/biotin and avidin/biotin; examples of suitable fluorescent materials include umbelliferone, fluorescein, fluorescein isothiocyanate, rhodamine, dichlorotriazinylamine fluorescein, dansyl chloride or phycoerythrin; an example of a luminescent material includes luminol; examples of bioluminescent materials include luciferase, luciferin, and aequorin; and examples of suitable radioactive material include 125I, 131I, 111In or 99Tc.

[0308] Further, an antibody or fragment thereof may be conjugated to a therapeutic moiety such as a cytotoxin, e.g., a cytostatic or cytocidal agent, a therapeutic agent or a radioactive metal ion, e.g., alpha-emitters such as, for example, 213Bi. A cytotoxin or cytotoxic agent includes any agent that is detrimental to cells. Examples include paclitaxol, cytochalasin B, gramicidin D, ethidium bromide, emetine, mitomycin, etoposide, tenoposide, vincristine, vinblastine, colchicin, doxorubicin, daunorubicin, dihydroxy anthracin dione, mitoxantrone, mithramycin, actinomycin D, 1-dehydrotestosterone, glucocorticoids, procaine, tetracaine, lidocaine, propranolol, and puromycin and analogs or homologs thereof. Therapeutic agents include, but are not limited to, antimetabolites (e.g., methotrexate, 6-mercaptopurine, 6-thioguanine, cytarabine, 5-fluorouracil decarbazine), alkylating agents (e.g., mechlorethamine, thioepa chlorambucil, melphalan, carmustine (BSNU) and lomustine (CCNU), cyclothosphamide, busulfan, dibromomannitol, streptozotocin, mitomycin C, and cis-dichlorodiamine platinum (II) (DDP) cisplatin), anthracyclines (e.g., daunorubicin (formerly daunomycin) and doxorubicin), antibiotics (e.g., dactinomycin (formerly actinomycin), bleomycin, mithramycin, and anthramycin (AMC)), and anti-mitotic agents (e.g., vincristine and vinblastine).

[0309] The conjugates of the invention can be used for modifying a given biological response, the therapeutic agent or drug moiety is not to be construed as limited to classical chemical therapeutic agents. For example, the drug moiety may be a protein or polypeptide possessing a desired biological activity. Such proteins may include, for example, a toxin such as abrin, ricin A, pseudomonas exotoxin, or diphtheria toxin; a protein such as tumor necrosis factor, a-interferon, β-interferon, nerve growth factor, platelet derived growth factor, tissue plasminogen activator, an apoptotic agent, e.g., TNF-alpha, TNF-beta, AIM I (See, International Publication No. WO 97/33899), AIM II (See, International Publication No. WO 97/34911), Fas Ligand (Takahashi et al., Int. Immunol., 6:1567-1574 (1994)), VEGI (See, International Publication No. WO 99/23105), a thrombotic agent or an anti-angiogenic agent, e.g., angiostatin or endostatin; or, biological response modifiers such as, for example, lymphokines, interleukin-1 (“IL-1”), interleukin-2 (“IL-2”), interleukin-6 (“IL-6”), granulocyte macrophage colony stimulating factor (“GM-CSF”), granulocyte colony stimulating factor (“G-CSF”), or other growth factors.

[0310] Antibodies may also be attached to solid supports, which are particularly useful for immunoassays or purification of the target antigen. Such solid supports include, but are not limited to, glass, cellulose, polyacrylamide, nylon, polystyrene, polyvinyl chloride or polypropylene.

[0311] Techniques for conjugating such therapeutic moiety to antibodies are well known. See, for example, Arnon et al., “Monoclonal Antibodies For Immunotargeting Of Drugs In Cancer Therapy”, in Monoclonal Antibodies And Cancer Therapy, Reisfeld et al. (eds.), pp. 243-56 (Alan R. Liss, Inc. 1985); Hellstrom et al., “Antibodies For Drug Delivery”, in Controlled Drug Delivery (2nd Ed.), Robinson et al. (eds.), pp. 623-53 (Marcel Dekker, Inc. 1987); Thorpe, “Antibody Carriers Of Cytotoxic Agents In Cancer Therapy: A Review”, in Monoclonal Antibodies '84: Biological And Clinical Applications, Pinchera et al. (eds.), pp. 475-506 (1985); “Analysis, Results, And Future Prospective Of The Therapeutic Use Of Radiolabeled Antibody In Cancer Therapy”, in Monoclonal Antibodies For Cancer Detection And Therapy, Baldwin et al. (eds.), pp. 303-16 (Academic Press 1985), and Thorpe et al., “The Preparation And Cytotoxic Properties Of Antibody-Toxin Conjugates”, Immunol. Rev. 62:119-58 (1982).

[0312] Alternatively, an antibody can be conjugated to a second antibody to form an antibody heteroconjugate as described by Segal in U.S. Pat. No. 4,676,980, which is incorporated herein by reference in its entirety.

[0313] An antibody, with or without a therapeutic moiety conjugated to it, administered alone or in combination with cytotoxic factor(s) and/or cytokine(s) can be used as a therapeutic.

[0314] Immunophenotyping

[0315] The antibodies of the invention may be utilized for immunophenotyping of cell lines and biological samples. Translation products of the gene of the present invention may be useful as cell-specific markers, or more specifically as cellular markers that are differentially expressed at various stages of differentiation and/or maturation of particular cell types. Monoclonal antibodies directed against a specific epitope, or combination of epitopes, will allow for the screening of cellular populations expressing the marker. Various techniques can be utilized using monoclonal antibodies to screen for cellular populations expressing the marker(s), and include magnetic separation using antibody-coated magnetic beads, “panning” with antibody attached to a solid matrix (i.e., plate), and flow cytometry (See, e.g., U.S. Pat. No. 5,985,660; and Morrison et al., Cell, 96:737-49 (1999)).

[0316] These techniques allow for the screening of particular populations of cells, such as might be found with hematological malignancies (i.e. minimal residual disease (MRD) in acute leukemic patients) and “non-self” cells in transplantations to prevent Graft-versus-Host Disease (GVHD). Alternatively, these techniques allow for the screening of hematopoietic stem and progenitor cells capable of undergoing proliferation and/or differentiation, as might be found in human umbilical cord blood.

[0317] Assays for Antibody Binding

[0318] The antibodies of the invention may be assayed for immunospecific binding by any method known in the art. The immunoassays which can be used include but are not limited to competitive and non-competitive assay systems using techniques such as western blots, radioimmunoassays, ELISA (enzyme linked immunosorbent assay), “sandwich” immunoassays, immunoprecipitation assays, precipitin reactions, gel diffusion precipitin reactions, immunodiffusion assays, agglutination assays, complement-fixation assays, immunoradiometric assays, fluorescent immunoassays, and protein A immunoassays, to name but a few. Such assays are routine and well known in the art (see, e.g., Ausubel et al, eds, 1994, Current Protocols in Molecular Biology, Vol. 1, John Wiley & Sons, Inc., New York, which is incorporated by reference herein in its entirety). Exemplary immunoassays are described briefly below (but are not intended by way of limitation).

[0319] Immunoprecipitation protocols generally comprise lysing a population of cells in a lysis buffer such as RIPA buffer (1% NP-40 or Triton X-100, 1% sodium deoxycholate, 0.1% SDS, 0.15 M NaCl, 0.01 M sodium phosphate at pH 7.2, 1% Trasylol) supplemented with protein phosphatase and/or protease inhibitors (e.g., EDTA, PMSF, aprotinin, sodium vanadate), adding the antibody of interest to the cell lysate, incubating for a period of time (e.g., 1-4 hours) at 4° C., adding protein A and/or protein G sepharose beads to the cell lysate, incubating for about an hour or more at 4° C., washing the beads in lysis buffer and resuspending the beads in SDS/sample buffer. The ability of the antibody of interest to immunoprecipitate a particular antigen can be assessed by, e.g., western blot analysis. One of skill in the art would be knowledgeable as to the parameters that can be modified to increase the binding of the antibody to an antigen and decrease the background (e.g., pre-clearing the cell lysate with sepharose beads). For further discussion regarding immunoprecipitation protocols see, e.g., Ausubel et al., eds., (1994), Current Protocols in Molecular Biology, Vol. 1, John Wiley & Sons, Inc., New York, section 10.16.1.

[0320] Western blot analysis generally comprises preparing protein samples, electrophoresis of the protein samples in a polyacrylamide gel (e.g., 8%-20% SDS-PAGE depending on the molecular weight of the antigen), transferring the protein sample from the polyacrylamide gel to a membrane such as nitrocellulose, PVDF or nylon, blocking the membrane in blocking solution (e.g., PBS with 3% BSA or non-fat milk), washing the membrane in washing buffer (e.g., PBS-Tween 20), blocking the membrane with primary antibody (the antibody of interest) diluted in blocking buffer, washing the membrane in washing buffer, blocking the membrane with a secondary antibody (which recognizes the primary antibody, e.g., an anti-human antibody) conjugated to an enzymatic substrate (e.g., horseradish peroxidase or alkaline phosphatase) or radioactive molecule (e.g., 32P or 125I) diluted in blocking buffer, washing the membrane in wash buffer, and detecting the presence of the antigen. One of skill in the art would be knowledgeable as to the parameters that can be modified to increase the signal detected and to reduce the background noise. For further discussion regarding western blot protocols see, e.g., Ausubel et al, eds, (1994), Current Protocols in Molecular Biology, Vol. 1, John Wiley & Sons, Inc., New York, section 10.8.1.

[0321] ELISAs comprise preparing antigen, coating the well of a 96 well microtiter plate with the antigen, adding the antibody of interest conjugated to a detectable compound such as an enzymatic substrate (e.g., horseradish peroxidase or alkaline phosphatase) to the well and incubating for a period of time, and detecting the presence of the antigen. In ELISAs the antibody of interest does not have to be conjugated to a detectable compound; instead, a second antibody (which recognizes the antibody of interest) conjugated to a detectable compound may be added to the well. Further, instead of coating the well with the antigen, the antibody may be coated to the well. In this case, a second antibody conjugated to a detectable compound may be added following the addition of the antigen of interest to the coated well. One of skill in the art would be knowledgeable as to the parameters that can be modified to increase the signal detected as well as other variations of ELISAs known in the art. For further discussion regarding ELISAs see, e.g., Ausubel et al, eds, (1994), Current Protocols in Molecular Biology, Vol. 1, John Wiley & Sons, Inc., New York, section 11.2.1.

[0322] The binding affinity of an antibody to an antigen and the off-rate of an antibody-antigen interaction can be determined by competitive binding assays. One example of a competitive binding assay is a radioimmunoassay comprising the incubation of labeled antigen (e.g., 3H or 125I) with the antibody of interest in the presence of increasing amounts of unlabeled antigen, and the detection of the antibody bound to the labeled antigen. The affinity of the antibody of interest for a particular antigen and the binding off-rates can be determined from the data by scatchard plot analysis. Competition with a second antibody can also be determined using radioimmunoassays. In this case, the antigen is incubated with antibody of interest conjugated to a labeled compound (e.g., 3H or 124I) in the presence of increasing amounts of an unlabeled second antibody.

[0323] Antibodies of the invention may be characterized using immunocytochemisty methods on cells (e.g., mammalian cells, such as CHO cells) transfected with a vector enabling the expression of an antigen or with vector alone using techniques commonly known in the art. Antibodies that bind antigen transfected cells, but not vector-only transfected cells, are antigen specific.

[0324] Therapeutic Uses

[0325] The present invention is further directed to antibody-based therapies which involve administering antibodies of the invention to an animal, preferably a mammal, and most preferably a human, patient for treating one or more of the disclosed diseases, disorders, or conditions. Therapeutic compounds of the invention include, but are not limited to, antibodies of the invention (including fragments, analogs and derivatives thereof as described herein) and nucleic acids encoding antibodies of the invention (including fragments, analogs and derivatives thereof and anti-idiotypic antibodies as described herein). The antibodies of the invention can be used to treat, inhibit or prevent diseases, disorders or conditions associated with aberrant expression and/or activity of a polypeptide of the invention, including, but not limited to, any one or more of the diseases, disorders, or conditions described herein. The treatment and/or prevention of diseases, disorders, or conditions associated with aberrant expression and/or activity of a polypeptide of the invention includes, but is not limited to, alleviating symptoms associated with those diseases, disorders or conditions. Antibodies of the invention may be provided in pharmaceutically acceptable compositions as known in the art or as described herein.

[0326] In a specific and preferred embodiment, the present invention is directed to antibody-based therapies which involve administering antibodies of the invention to an animal, preferably a mammal, and most preferably a human, patient for treating one or more diseases, disorders, or conditions, including but not limited to: neural disorders, immune system disorders, muscular disorders, reproductive disorders, gastrointestinal disorders, pulmonary disorders, cardiovascular disorders, renal disorders, proliferative disorders, and/or cancerous diseases and conditions., and/or as described elsewhere herein. Therapeutic compounds of the invention include, but are not limited to, antibodies of the invention (e.g., antibodies directed to the full length protein expressed on the cell surface of a mammalian cell; antibodies directed to an epitope of a polypeptide of the invention (such as, for example, a predicted linear epitope shown in column 7 of Table 1A; or a conformational epitope, including fragments, analogs and derivatives thereof as described herein) and nucleic acids encoding antibodies of the invention (including fragments, analogs and derivatives thereof and anti-idiotypic antibodies as described herein). The antibodies of the invention can be used to treat, inhibit or prevent diseases, disorders or conditions associated with aberrant expression and/or activity of a polypeptide of the invention, including, but not limited to, any one or more of the diseases, disorders, or conditions described herein. The treatment and/or prevention of diseases, disorders, or conditions associated with aberrant expression and/or activity of a polypeptide of the invention includes, but is not limited to, alleviating symptoms associated with those diseases, disorders or conditions. Antibodies of the invention may be provided in pharmaceutically acceptable compositions as known in the art or as described herein.

[0327] A summary of the ways in which the antibodies of the present invention may be used therapeutically includes binding polynucleotides or polypeptides of the present invention locally or systemically in the body or by direct cytotoxicity of the antibody, e.g. as mediated by complement (CDC) or by effector cells (ADCC). Some of these approaches are described in more detail below. Armed with the teachings provided herein, one of ordinary skill in the art will know how to use the antibodies of the present invention for diagnostic, monitoring or therapeutic purposes without undue experimentation.

[0328] The antibodies of this invention may be advantageously utilized in combination with other monoclonal or chimeric antibodies, or with lymphokines or hematopoietic growth factors (such as, e.g., IL-2, IL-3 and IL-7), for example, which serve to increase the number or activity of effector cells which interact with the antibodies.

[0329] The antibodies of the invention may be administered alone or in combination with other types of treatments (e.g., radiation therapy, chemotherapy, hormonal therapy, immunotherapy and anti-tumor agents). Generally, administration of products of a species origin or species reactivity (in the case of antibodies) that is the same species as that of the patient is preferred. Thus, in a preferred embodiment, human antibodies, fragments derivatives, analogs, or nucleic acids, are administered to a human patient for therapy or prophylaxis.

[0330] It is preferred to use high affinity and/or potent in vivo inhibiting and/or neutralizing antibodies against polypeptides or polynucleotides of the present invention, fragments or regions thereof, for both immunoassays directed to and therapy of disorders related to polynucleotides or polypeptides, including fragments thereof, of the present invention. Such antibodies, fragments, or regions, will preferably have an affinity for polynucleotides or polypeptides of the invention, including fragments thereof. Preferred binding affinities include those with a dissociation constant or Kd less than 5×10⁻² M, 10⁻² M, 5×10⁻³ M, 10⁻³M, 5×10⁻⁴M, 10⁻⁴M, 5×10⁻⁵M, 10⁻⁵M, 5×10⁻⁶ M, 10⁻⁶ M, 5×10⁻⁷ M, 10⁻⁷ M, 5×10⁻⁸ M, 10⁻⁸ M, 5×10⁻⁹ M, 10⁻⁹ M, 5×10⁻¹⁰ M, 10⁻¹⁰ M, 5×10⁻¹¹ M, 10⁻¹¹ M, 5×10⁻¹² M, 10⁻¹² M, 5×10⁻¹³ M, 10⁻¹³ M, 5×10⁻¹⁴ M, 10⁻¹⁴ M, 5×10⁻¹⁵ M, and 10⁻¹⁵ M.

[0331] Gene Therapy

[0332] In a specific embodiment, nucleic acids comprising sequences encoding antibodies or functional derivatives thereof, are administered to treat, inhibit or prevent a disease or disorder associated with aberrant expression and/or activity of a polypeptide of the invention, by way of gene therapy. Gene therapy refers to therapy performed by the administration to a subject of an expressed or expressible nucleic acid. In this embodiment of the invention, the nucleic acids produce their encoded protein that mediates a therapeutic effect.

[0333] Any of the methods for gene therapy available in the art can be used according to the present invention. Exemplary methods are described below.

[0334] For general reviews of the methods of gene therapy, see Goldspiel et al., Clinical Pharmacy 12:488-505 (1993); Wu and Wu, Biotherapy 3:87-95 (1991); Tolstoshev, Ann. Rev. Pharmacol. Toxicol. 32:573-596 (1993); Mulligan, Science 260:926-932 (1993); and Morgan and Anderson, Ann. Rev. Biochem. 62:191-217 (1993); May, TIBTECH 11(5):155-215 (1993). Methods commonly known in the art of recombinant DNA technology which can be used are described in Ausubel et al. (eds.), Current Protocols in Molecular Biology, John Wiley & Sons, NY (1993); and Kriegler, Gene Transfer and Expression, A Laboratory Manual, Stockton Press, NY (1990).

[0335] In a preferred embodiment, the compound comprises nucleic acid sequences encoding an antibody, said nucleic acid sequences being part of expression vectors that express the antibody or fragments or chimeric proteins or heavy or light chains thereof in a suitable host. In particular, such nucleic acid sequences have promoters operably linked to the antibody coding region, said promoter being inducible or constitutive, and, optionally, tissue-specific. In another particular embodiment, nucleic acid molecules are used in which the antibody coding sequences and any other desired sequences are flanked by regions that promote homologous recombination at a desired site in the genome, thus providing for intrachromosomal expression of the antibody encoding nucleic acids (Koller and Smithies, Proc. Natl. Acad. Sci. USA 86:8932-8935 (1989); Zijlstra et al., Nature 342:435-438 (1989). In specific embodiments, the expressed antibody molecule is a single chain antibody; alternatively, the nucleic acid sequences include sequences encoding both the heavy and light chains, or fragments thereof, of the antibody.

[0336] Delivery of the nucleic acids into a patient may be either direct, in which case the patient is directly exposed to the nucleic acid or nucleic acid-carrying vectors, or indirect, in which case, cells are first transformed with the nucleic acids in vitro, then transplanted into the patient. These two approaches are known, respectively, as in vivo or ex vivo gene therapy.

[0337] In a specific embodiment, the nucleic acid sequences are directly administered in vivo, where it is expressed to produce the encoded product. This can be accomplished by any of numerous methods known in the art, e.g., by constructing them as part of an appropriate nucleic acid expression vector and administering it so that they become intracellular, e.g., by infection using defective or attenuated retrovirals or other viral vectors (see U.S. Pat. No. 4,980,286), or by direct injection of naked DNA, or by use of microparticle bombardment (e.g., a gene gun; Biolistic, Dupont), or coating with lipids or cell-surface receptors or transfecting agents, encapsulation in liposomes, microparticles, or microcapsules, or by administering them in linkage to a peptide which is known to enter the nucleus, by administering it in linkage to a ligand subject to receptor-mediated endocytosis (see, e.g., Wu and Wu, J. Biol. Chem. 262:4429-4432 (1987)) (which can be used to target cell types specifically expressing the receptors), etc. In another embodiment, nucleic acid-ligand complexes can be formed in which the ligand comprises a fusogenic viral peptide to disrupt endosomes, allowing the nucleic acid to avoid lysosomal degradation. In yet another embodiment, the nucleic acid can be targeted in vivo for cell specific uptake and expression, by targeting a specific receptor (see, e.g., PCT Publications WO 92/06180; WO 92/22635; WO92/20316; WO93/14188, WO 93/20221). Alternatively, the nucleic acid can be introduced intracellularly and incorporated within host cell DNA for expression, by homologous recombination (Koller and Smithies, Proc. Natl. Acad. Sci. USA 86:8932-8935 (1989); Zijlstra et al., Nature 342:435-438 (1989)).

[0338] In a specific embodiment, viral vectors that contains nucleic acid sequences encoding an antibody of the invention are used. For example, a retroviral vector can be used (see Miller et al., Meth. Enzymol. 217:581-599 (1993)). These retroviral vectors contain the components necessary for the correct packaging of the viral genome and integration into the host cell DNA. The nucleic acid sequences encoding the antibody to be used in gene therapy are cloned into one or more vectors, which facilitates delivery of the gene into a patient. More detail about retroviral vectors can be found in Boesen et al., Biotherapy 6:291-302 (1994), which describes the use of a retroviral vector to deliver the mdrl gene to hematopoietic stem cells in order to make the stem cells more resistant to chemotherapy. Other references illustrating the use of retroviral vectors in gene therapy are: Clowes et al., J. Clin. Invest. 93:644-651 (1994); Kiem et al., Blood 83:1467-1473 (1994); Salmons and Gunzberg, Human Gene Therapy 4:129-141 (1993); and Grossman and Wilson, Curr. Opin. in Genetics and Devel. 3:110⁻¹¹⁴ (1993).

[0339] Adenoviruses are other viral vectors that can be used in gene therapy. Adenoviruses are especially attractive vehicles for delivering genes to respiratory epithelia. Adenoviruses naturally infect respiratory epithelia where they cause a mild disease. Other targets for adenovirus-based delivery systems are liver, the central nervous system, endothelial cells, and muscle. Adenoviruses have the advantage of being capable of infecting non-dividing cells. Kozarsky and Wilson, Current Opinion in Genetics and Development 3:499-503 (1993) present a review of adenovirus-based gene therapy. Bout et al., Human Gene Therapy 5:3-10 (1994) demonstrated the use of adenovirus vectors to transfer genes to the respiratory epithelia of rhesus monkeys. Other instances of the use of adenoviruses in gene therapy can be found in Rosenfeld et al., Science 252:431-434 (1991); Rosenfeld et al., Cell 68:143-155 (1992); Mastrangeli et al., J. Clin. Invest. 91:225-234 (1993); PCT Publication WO94/12649; and Wang, et al., Gene Therapy 2:775-783 (1995). In a preferred embodiment, adenovirus vectors are used.

[0340] Adeno-associated virus (AAV) has also been proposed for use in gene therapy (Walsh et al., Proc. Soc. Exp. Biol. Med. 204:289-300 (1993); U.S. Pat. No. 5,436,146).

[0341] Another approach to gene therapy involves transferring a gene to cells in tissue culture by such methods as electroporation, lipofection, calcium phosphate mediated transfection, or viral infection. Usually, the method of transfer includes the transfer of a selectable marker to the cells. The cells are then placed under selection to isolate those cells that have taken up and are expressing the transferred gene. Those cells are then delivered to a patient.

[0342] In this embodiment, the nucleic acid is introduced into a cell prior to administration in vivo of the resulting recombinant cell. Such introduction can be carried out by any method known in the art, including but not limited to transfection, electroporation, microinjection, infection with a viral or bacteriophage vector containing the nucleic acid sequences, cell fusion, chromosome-mediated gene transfer, microcell-mediated gene transfer, spheroplast fusion, etc. Numerous techniques are known in the art for the introduction of foreign genes into cells (see, e.g., Loeffler and Behr, Meth. Enzymol. 217:599-618 (1993); Cohen et al., Meth. Enzymol. 217:618-644 (1993); Cline, Pharmac. Ther. 29:69-92m (1985) and may be used in accordance with the present invention, provided that the necessary developmental and physiological functions of the recipient cells are not disrupted. The technique should provide for the stable transfer of the nucleic acid to the cell, so that the nucleic acid is expressible by the cell and preferably heritable and expressible by progeny.

[0343] The resulting recombinant cells can be delivered to a patient by various methods known in the art. Recombinant blood cells (e.g., hematopoietic stem or progenitor cells) are preferably administered intravenously. The amount of cells envisioned for use depends on the desired effect, patient state, etc., and can be determined by one skilled in the art.

[0344] Cells into which a nucleic acid can be introduced for purposes of gene therapy encompass any desired, available cell type, and include but are not limited to epithelial cells, endothelial cells, keratinocytes, fibroblasts, muscle cells, hepatocytes; blood cells such as T lymphocytes, B lymphocytes, monocytes, macrophages, neutrophils, eosinophils, megakaryocytes, granulocytes; various stem or progenitor cells, in particular hematopoietic stem or progenitor cells, e.g., as obtained from bone marrow, umbilical cord blood, peripheral blood, fetal liver, etc.

[0345] In a preferred embodiment, the cell used for gene therapy is autologous to the patient.

[0346] In an embodiment in which recombinant cells are used in gene therapy, nucleic acid sequences encoding an antibody are introduced into the cells such that they are expressible by the cells or their progeny, and the recombinant cells are then administered in vivo for therapeutic effect. In a specific embodiment, stem or progenitor cells are used. Any stem and/or progenitor cells which can be isolated and maintained in vitro can potentially be used in accordance with this embodiment of the present invention (see e.g. PCT Publication WO 94/08598; Stemple and Anderson, Cell 71:973-985 (1992); Rheinwald, Meth. Cell Bio. 21A:229 (1980); and Pittelkow and Scott, Mayo Clinic Proc. 61:771 (1986)).

[0347] In a specific embodiment, the nucleic acid to be introduced for purposes of gene therapy comprises an inducible promoter operably linked to the coding region, such that expression of the nucleic acid is controllable by the presence or absence of an appropriate inducer of transcription.

[0348] Demonstration of Therapeutic or Prophylactic Activity

[0349] The compounds or pharmaceutical compositions of the invention are preferably tested in vitro, and then in vivo for the desired therapeutic or prophylactic activity, prior to use in humans. For example, in vitro assays to demonstrate the therapeutic or prophylactic utility of a compound or pharmaceutical composition include, the effect of a compound on a cell line or a patient tissue sample. The effect of the compound or composition on the cell line and/or tissue sample can be determined utilizing techniques known to those of skill in the art including, but not limited to, rosette formation assays and cell lysis assays. In accordance with the invention, in vitro assays which can be used to determine whether administration of a specific compound is indicated, include in vitro cell culture assays in which a patient tissue sample is grown in culture, and exposed to or otherwise administered a compound, and the effect of such compound upon the tissue sample is observed.

[0350] Therapeutic/Prophylactic Administration and Composition

[0351] The invention provides methods of treatment, inhibition and prophylaxis by administration to a subject of an effective amount of a compound or pharmaceutical composition of the invention, preferably a polypeptide or antibody of the invention. In a preferred embodiment, the compound is substantially purified (e.g., substantially free from substances that limit its effect or produce undesired side-effects). The subject is preferably an animal, including but not limited to animals such as cows, pigs, horses, chickens, cats, dogs, etc., and is preferably a mammal, and most preferably human.

[0352] Formulations and methods of administration that can be employed when the compound comprises a nucleic acid or an immunoglobulin are described above; additional appropriate formulations and routes of administration can be selected from among those described herein below.

[0353] Various delivery systems are known and can be used to administer a compound of the invention, e.g., encapsulation in liposomes, microparticles, microcapsules, recombinant cells capable of expressing the compound, receptor-mediated endocytosis (see, e.g., Wu and Wu, J. Biol. Chem. 262:4429-4432 (1987)), construction of a nucleic acid as part of a retroviral or other vector, etc. Methods of introduction include but are not limited to intradermal, intramuscular, intraperitoneal, intravenous, subcutaneous, intranasal, epidural, and oral routes. The compounds or compositions may be administered by any convenient route, for example by infusion or bolus injection, by absorption through epithelial or mucocutaneous linings (e.g., oral mucosa, rectal and intestinal mucosa, etc.) and may be administered together with other biologically active agents. Administration can be systemic or local. In addition, it may be desirable to introduce the pharmaceutical compounds or compositions of the invention into the central nervous system by any suitable route, including intraventricular and intrathecal injection; intraventricular injection may be facilitated by an intraventricular catheter, for example, attached to a reservoir, such as an Ommaya reservoir. Pulmonary administration can also be employed, e.g., by use of an inhaler or nebulizer, and formulation with an aerosolizing agent.

[0354] In a specific embodiment, it may be desirable to administer the pharmaceutical compounds or compositions of the invention locally to the area in need of treatment; this may be achieved by, for example, and not by way of limitation, local infusion during surgery, topical application, e.g., in conjunction with a wound dressing after surgery, by injection, by means of a catheter, by means of a suppository, or by means of an implant, said implant being of a porous, non-porous, or gelatinous material, including membranes, such as sialastic membranes, or fibers. Preferably, when administering a protein, including an antibody, of the invention, care must be taken to use materials to which the protein does not absorb.

[0355] In another embodiment, the compound or composition can be delivered in a vesicle, in particular a liposome (see Langer, Science 249:1527-1533 (1990); Treat et al., in Liposomes in the Therapy of Infectious Disease and Cancer, Lopez-Berestein and Fidler (eds.), Liss, New York, pp. 353-365 (1989); Lopez-Berestein, ibid., pp. 317-327; see generally ibid.)

[0356] In yet another embodiment, the compound or composition can be delivered in a controlled release system. In one embodiment, a pump may be used (see Langer, supra; Sefton, CRC Crit. Ref. Biomed. Eng. 14:201 (1987); Buchwald et al., Surgery 88:507 (1980); Saudek et al., N. Engl. J. Med. 321:574 (1989)). In another embodiment, polymeric materials can be used (see Medical Applications of Controlled Release, Langer and Wise (eds.), CRC Pres., Boca Raton, Fla. (1974); Controlled Drug Bioavailability, Drug Product Design and Performance, Smolen and Ball (eds.), Wiley, New York (1984); Ranger and Peppas, J., Macromol. Sci. Rev. Macromol. Chem. 23:61 (1983); see also Levy et al., Science 228:190 (1985); During et al., Ann. Neurol. 25:351 (1989); Howard et al., J.Neurosurg. 71:105 (1989)). In yet another embodiment, a controlled release system can be placed in proximity of the therapeutic target, e.g., the brain, thus requiring only a fraction of the systemic dose (see, e.g., Goodson, in Medical Applications of Controlled Release, supra, vol. 2, pp. 115-138 (1984)).

[0357] Other controlled release systems are discussed in the review by Langer (Science 249:1527-1533 (1990)).

[0358] In a specific embodiment where the compound of the invention is a nucleic acid encoding a protein, the nucleic acid can be administered in vivo to promote expression of its encoded protein, by constructing it as part of an appropriate nucleic acid expression vector and administering it so that it becomes intracellular, e.g., by use of a retroviral vector (see U.S. Pat. No. 4,980,286), or by direct injection, or by use of microparticle bombardment (e.g., a gene gun; Biolistic, Dupont), or coating with lipids or cell-surface receptors or transfecting agents, or by administering it in linkage to a homeobox-like peptide which is known to enter the nucleus (see e.g., Joliot et al., Proc. Natl. Acad. Sci. USA 88:1864-1868 (1991)), etc. Alternatively, a nucleic acid can be introduced intracellularly and incorporated within host cell DNA for expression, by homologous recombination.

[0359] The present invention also provides pharmaceutical compositions. Such compositions comprise a therapeutically effective amount of a compound, and a pharmaceutically acceptable carrier. In a specific embodiment, the term “pharmaceutically acceptable” means approved by a regulatory agency of the Federal or a state government or listed in the U.S. Pharmacopeia or other generally recognized pharmacopeia for use in animals, and more particularly in humans. The term “carrier” refers to a diluent, adjuvant, excipient, or vehicle with which the therapeutic is administered. Such pharmaceutical carriers can be sterile liquids, such as water and oils, including those of petroleum, animal, vegetable or synthetic origin, such as peanut oil, soybean oil, mineral oil, sesame oil and the like. Water is a preferred carrier when the pharmaceutical composition is administered intravenously. Saline solutions and aqueous dextrose and glycerol solutions can also be employed as liquid carriers, particularly for injectable solutions. Suitable pharmaceutical excipients include starch, glucose, lactose, sucrose, gelatin, malt, rice, flour, chalk, silica gel, sodium stearate, glycerol monostearate, talc, sodium chloride, dried skim milk, glycerol, propylene, glycol, water, ethanol and the like. The composition, if desired, can also contain minor amounts of wetting or emulsifying agents, or pH buffering agents. These compositions can take the form of solutions, suspensions, emulsion, tablets, pills, capsules, powders, sustained-release formulations and the like. The composition can be formulated as a suppository, with traditional binders and carriers such as triglycerides. Oral formulation can include standard carriers such as pharmaceutical grades of mannitol, lactose, starch, magnesium stearate, sodium saccharine, cellulose, magnesium carbonate, etc. Examples of suitable pharmaceutical carriers are described in “Remington's Pharmaceutical Sciences” by E. W. Martin. Such compositions will contain a therapeutically effective amount of the compound, preferably in purified form, together with a suitable amount of carrier so as to provide the form for proper administration to the patient. The formulation should suit the mode of administration.

[0360] In a preferred embodiment, the composition is formulated in accordance with routine procedures as a pharmaceutical composition adapted for intravenous administration to human beings. Typically, compositions for intravenous administration are solutions in sterile isotonic aqueous buffer. Where necessary, the composition may also include a solubilizing agent and a local anesthetic such as lignocaine to ease pain at the site of the injection. Generally, the ingredients are supplied either separately or mixed together in unit dosage form, for example, as a dry lyophilized powder or water free concentrate in a hermetically sealed container such as an ampoule or sachette indicating the quantity of active agent. Where the composition is to be administered by infusion, it can be dispensed with an infusion bottle containing sterile pharmaceutical grade water or saline. Where the composition is administered by injection, an ampoule of sterile water for injection or saline can be provided so that the ingredients may be mixed prior to administration.

[0361] The compounds of the invention can be formulated as neutral or salt forms. Pharmaceutically acceptable salts include those formed with anions such as those derived from hydrochloric, phosphoric, acetic, oxalic, tartaric acids, etc., and those formed with cations such as those derived from sodium, potassium, ammonium, calcium, ferric hydroxides, isopropylamine, triethylamine, 2-ethylamino ethanol, histidine, procaine, etc.

[0362] The amount of the compound of the invention which will be effective in the treatment, inhibition and prevention of a disease or disorder associated with aberrant expression and/or activity of a polypeptide of the invention can be determined by standard clinical techniques. In addition, in vitro assays may optionally be employed to help identify optimal dosage ranges. The precise dose to be employed in the formulation will also depend on the route of administration, and the seriousness of the disease or disorder, and should be decided according to the judgment of the practitioner and each patient's circumstances. Effective doses may be extrapolated from dose-response curves derived from in vitro or animal model test systems.

[0363] For antibodies, the dosage administered to a patient is typically 0.1 mg/kg to 100 mg/kg of the patient's body weight. Preferably, the dosage administered to a patient is between 0.1 mg/kg and 20 mg/kg of the patient's body weight, more preferably 1 mg/kg to 10 mg/kg of the patient's body weight. Generally, human antibodies have a longer half-life within the human body than antibodies from other species due to the immune response to the foreign polypeptides. Thus, lower dosages of human antibodies and less frequent administration is often possible. Further, the dosage and frequency of administration of antibodies of the invention may be reduced by enhancing uptake and tissue penetration (e.g., into the brain) of the antibodies by modifications such as, for example, lipidation.

[0364] The invention also provides a pharmaceutical pack or kit comprising one or more containers filled with one or more of the ingredients of the pharmaceutical compositions of the invention. Optionally associated with such container(s) can be a notice in the form prescribed by a governmental agency regulating the manufacture, use or sale of pharmaceuticals or biological products, which notice reflects approval by the agency of manufacture, use or sale for human administration.

[0365] Diagnosis and Imaging

[0366] Labeled antibodies, and derivatives and analogs thereof, which specifically bind to a polypeptide of interest can be used for diagnostic purposes to detect, diagnose, or monitor diseases, disorders, and/or conditions associated with the aberrant expression and/or activity of a polypeptide of the invention. The invention provides for the detection of aberrant expression of a polypeptide of interest, comprising (a) assaying the expression of the polypeptide of interest in cells or body fluid of an individual using one or more antibodies specific to the polypeptide interest and (b) comparing the level of gene expression with a standard gene expression level, whereby an increase or decrease in the assayed polypeptide gene expression level compared to the standard expression level is indicative of aberrant expression.

[0367] The invention provides a diagnostic assay for diagnosing a disorder, comprising (a) assaying the expression of the polypeptide of interest in cells or body fluid of an individual using one or more antibodies specific to the polypeptide interest and (b) comparing the level of gene expression with a standard gene expression level, whereby an increase or decrease in the assayed polypeptide gene expression level compared to the standard expression level is indicative of a particular disorder. With respect to cancer, the presence of a relatively high amount of transcript in biopsied tissue from an individual may indicate a predisposition for the development of the disease, or may provide a means for detecting the disease prior to the appearance of actual clinical symptoms. A more definitive diagnosis of this type may allow health professionals to employ preventative measures or aggressive treatment earlier thereby preventing the development or further progression of the cancer.

[0368] Antibodies of the invention can be used to assay protein levels in a biological sample using classical immunohistological methods known to those of skill in the art (e.g., see Jalkanen et al., J. Cell. Biol. 101:976-985 (1985); Jalkanen et al., J. Cell . Biol. 105:3087-3096 (1987)). Other antibody-based methods useful for detecting protein gene expression include immunoassays, such as the enzyme linked immunosorbent assay (ELISA) and the radioimmunoassay (RIA). Suitable antibody assay labels are known in the art and include enzyme labels, such as, glucose oxidase; radioisotopes, such as iodine (1251, 1211), carbon (14C), sulfur (35S), tritium (3H), indium (1 121n), and technetium (99Tc); luminescent labels, such as luminol; and fluorescent labels, such as fluorescein and rhodamine, and biotin.

[0369] One facet of the invention is the detection and diagnosis of a disease or disorder associated with aberrant expression of a polypeptide of interest in an animal, preferably a mammal and most preferably a human. In one embodiment, diagnosis comprises: a) administering (for example, parenterally, subcutaneously, or intraperitoneally) to a subject an effective amount of a labeled molecule which specifically binds to the polypeptide of interest; b) waiting for a time interval following the administering for permitting the labeled molecule to preferentially concentrate at sites in the subject where the polypeptide is expressed (and for unbound labeled molecule to be cleared to background level); c) determining background level; and d) detecting the labeled molecule in the subject, such that detection of labeled molecule above the background level indicates that the subject has a particular disease or disorder associated with aberrant expression of the polypeptide of interest. Background level can be determined by various methods including, comparing the amount of labeled molecule detected to a standard value previously determined for a particular system.

[0370] It will be understood in the art that the size of the subject and the imaging system used will determine the quantity of imaging moiety needed to produce diagnostic images. In the case of a radioisotope moiety, for a human subject, the quantity of radioactivity injected will normally range from about 5 to 20 millicuries of 99mTc. The labeled antibody or antibody fragment will then preferentially accumulate at the location of cells which contain the specific protein. In vivo tumor imaging is described in S.W. Burchiel et al., “Immunopharmacokinetics of Radiolabeled Antibodies and Their Fragments.” (Chapter 13 in Tumor Imaging: The Radiochemical Detection of Cancer, S. W. Burchiel and B. A. Rhodes, eds., Masson Publishing Inc. (1982)).

[0371] Depending on several variables, including the type of label used and the mode of administration, the time interval following the administration for permitting the labeled molecule to preferentially concentrate at sites in the subject and for unbound labeled molecule to be cleared to background level is 6 to 48 hours or 6 to 24 hours or 6 to 12 hours. In another embodiment the time interval following administration is 5 to 20 days or 5 to 10 days.

[0372] In an embodiment, monitoring of the disease or disorder is carried out by repeating the method for diagnosing the disease or disease, for example, one month after initial diagnosis, six months after initial diagnosis, one year after initial diagnosis, etc.

[0373] Presence of the labeled molecule can be detected in the patient using methods known in the art for in vivo scanning. These methods depend upon the type of label used. Skilled artisans will be able to determine the appropriate method for detecting a particular label. Methods and devices that may be used in the diagnostic methods of the invention include, but are not limited to, computed tomography (CT), whole body scan such as position emission tomography (PET), magnetic resonance imaging (MRI), and sonography.

[0374] In a specific embodiment, the molecule is labeled with a radioisotope and is detected in the patient using a radiation responsive surgical instrument (Thurston et al., U.S. Pat. No. 5,441,050). In another embodiment, the molecule is labeled with a fluorescent compound and is detected in the patient using a fluorescence responsive scanning instrument. In another embodiment, the molecule is labeled with a positron emitting metal and is detected in the patent using positron emission-tomography. In yet another embodiment, the molecule is labeled with a paramagnetic label and is detected in a patient using magnetic resonance imaging (MRI).

[0375] Kits

[0376] The present invention provides kits that can be used in the above methods. In one embodiment, a kit comprises an antibody of the invention, preferably a purified antibody, in one or more containers. In a specific embodiment, the kits of the present invention contain a substantially isolated polypeptide comprising an epitope which is specifically immunoreactive with an antibody included in the kit. Preferably, the kits of the present invention further comprise a control antibody which does not react with the polypeptide of interest. In another specific embodiment, the kits of the present invention contain a means for detecting the binding of an antibody to a polypeptide of interest (e.g., the antibody may be conjugated to a detectable substrate such as a fluorescent compound, an enzymatic substrate, a radioactive compound or a luminescent compound, or a second antibody which recognizes the first antibody may be conjugated to a detectable substrate).

[0377] In another specific embodiment of the present invention, the kit is a diagnostic kit for use in screening serum containing antibodies specific against proliferative and/or cancerous polynucleotides and polypeptides. Such a kit may include a control antibody that does not react with the polypeptide of interest. Such a kit may include a substantially isolated polypeptide antigen comprising an epitope which is specifically immunoreactive with at least one anti-polypeptide antigen antibody. Further, such a kit includes means for detecting the binding of said antibody to the antigen (e.g., the antibody may be conjugated to a fluorescent compound such as fluorescein or rhodamine which can be detected by flow cytometry). In specific embodiments, the kit may include a recombinantly produced or chemically synthesized polypeptide antigen. The polypeptide antigen of the kit may also be attached to a solid support.

[0378] In a more specific embodiment the detecting means of the above-described kit includes a solid support to which said polypeptide antigen is attached. Such a kit may also include a non-attached reporter-labeled anti-human antibody. In this embodiment, binding of the antibody to the polypeptide antigen can be detected by binding of the said reporter-labeled antibody.

[0379] In an additional embodiment, the invention includes a diagnostic kit for use in screening serum containing antigens of the polypeptide of the invention. The diagnostic kit includes a substantially isolated antibody specifically immunoreactive with polypeptide or polynucleotide antigens, and means for detecting the binding of the polynucleotide or polypeptide antigen to the antibody. In one embodiment, the antibody is attached to a solid support. In a specific embodiment, the antibody may be a monoclonal antibody. The detecting means of the kit may include a second, labeled monoclonal antibody. Alternatively, or in addition, the detecting means may include a labeled, competing antigen.

[0380] In one diagnostic configuration, test serum is reacted with a solid phase reagent having a surface-bound antigen obtained by the methods of the present invention. After binding with specific antigen antibody to the reagent and removing unbound serum components by washing, the reagent is reacted with reporter-labeled anti-human antibody to bind reporter to the reagent in proportion to the amount of bound anti-antigen antibody on the solid support. The reagent is again washed to remove unbound labeled antibody, and the amount of reporter associated with the reagent is determined. Typically, the reporter is an enzyme which is detected by incubating the solid phase in the presence of a suitable fluorometric, luminescent or calorimetric substrate (Sigma, St. Louis, Mo.).

[0381] The solid surface reagent in the above assay is prepared by known techniques for attaching protein material to solid support material, such as polymeric beads, dip sticks, 96-well plate or filter material. These attachment methods generally include non-specific adsorption of the protein to the support or covalent attachment of the protein, typically through a free amine group, to a chemically reactive group on the solid support, such as an activated carboxyl, hydroxyl, or aldehyde group. Alternatively, streptavidin coated plates can be used in conjunction with biotinylated antigen(s).

[0382] Thus, the invention provides an assay system or kit for carrying out this diagnostic method. The kit generally includes a support with surface-bound recombinant antigens, and a reporter-labeled anti-human antibody for detecting surface-bound anti-antigen antibody.

[0383] Uses of the Polynucleotides

[0384] Each of the polynucleotides identified herein can be used in numerous ways as reagents. The following description should be considered exemplary and utilizes known techniques.

[0385] The polynucleotides of the present invention are useful for chromosome identification. There exists an ongoing need to identify new chromosome markers, since few chromosome marking reagents, based on actual sequence data (repeat polymorphisms), are presently available. Each sequence is specifically targeted to and can hybridize with a particular location on an individual human chromosome, thus each polynucleotide of the present invention can routinely be used as a chromosome marker using techniques known in the art. Table 1A, column 9 provides the chromosome location of some of the polynucleotides of the invention.

[0386] Briefly, sequences can be mapped to chromosomes by preparing PCR primers (preferably at least 15 bp (e.g., 15-25 bp) from the sequences shown in SEQ ID NO:X. Primers can optionally be selected using computer analysis so that primers do not span more than one predicted exon in the genomic DNA. These primers are then used for PCR screening of somatic cell hybrids containing individual human chromosomes. Only those hybrids containing the human gene corresponding to SEQ ID NO:X will yield an amplified fragment.

[0387] Similarly, somatic hybrids provide a rapid method of PCR mapping the polynucleotides to particular chromosomes. Three or more clones can be assigned per day using a single thermal cycler. Moreover, sublocalization of the polynucleotides can be achieved with panels of specific chromosome fragments. Other gene mapping strategies that can be used include in situ hybridization, prescreening with labeled flow-sorted chromosomes, preselection by hybridization to construct chromosome specific-cDNA libraries, and computer mapping techniques (See, e.g., Shuler, Trends Biotechnol 16:456-459 (1998) which is hereby incorporated by reference in its entirety).

[0388] Precise chromosomal location of the polynucleotides can also be achieved using fluorescence in situ hybridization (FISH) of a metaphase chromosomal spread. This technique uses polynucleotides as short as 500 or 600 bases; however, polynucleotides 2,000-4,000 bp are preferred. For a review of this technique, see Verma et al., “Human Chromosomes: a Manual of Basic Techniques,” Pergamon Press, New York (1988).

[0389] For chromosome mapping, the polynucleotides can be used individually (to mark a single chromosome or a single site on that chromosome) or in panels (for marking multiple sites and/or multiple chromosomes).

[0390] Thus, the present invention also provides a method for chromosomal localization which involves (a) preparing PCR primers from the polynucleotide sequences in Table 1A and/or Table 2 and SEQ ID NO:X and (b) screening somatic cell hybrids containing individual chromosomes.

[0391] The polynucleotides of the present invention would likewise be useful for radiation hybrid mapping, HAPPY mapping, and long range restriction mapping. For a review of these techniques and others known in the art, see, e.g. Dear, “Genome Mapping: A Practical Approach,” IRL Press at Oxford University Press, London (1997); Aydin, J. Mol. Med. 77:691-694 (1999); Hacia et al., Mol. Psychiatry 3:483-492 (1998); Herrick et al., Chromosome Res. 7:409-423 (1999); Hamilton et al., Methods Cell Biol. 62:265-280 (2000); and/or Ott, J. Hered. 90:68-70 (1999) each of which is hereby incorporated by reference in its entirety.

[0392] Once a polynucleotide has been mapped to a precise chromosomal location, the physical position of the polynucleotide can be used in linkage analysis. Linkage analysis establishes coinheritance between a chromosomal location and presentation of a particular disease. (Disease mapping data are found, for example, in V. McKusick, Mendelian Inheritance in Man (available on line through Johns Hopkins University Welch Medical Library)). Column 10 of Table 1A provides an OMIM reference identification number of diseases associated with the cytologic band disclosed in column 9 of Table 1A, as determined using techniques described herein and by reference to Table 5. Assuming 1 megabase mapping resolution and one gene per 20 kb, a cDNA precisely localized to a chromosomal region associated with the disease could be one of 50-500 potential causative genes.

[0393] Thus, once coinheritance is established, differences in a polynucleotide of the invention and the corresponding gene between affected and unaffected individuals can be examined. First, visible structural alterations in the chromosomes, such as deletions or translocations, are examined in chromosome spreads or by PCR. If no structural alterations exist, the presence of point mutations are ascertained. Mutations observed in some or all affected individuals, but not in normal individuals, indicates that the mutation may cause the disease. However, complete sequencing of the polypeptide and the corresponding gene from several normal individuals is required to distinguish the mutation from a polymorphism. If a new polymorphism is identified, this polymorphic polypeptide can be used for further linkage analysis.

[0394] Furthermore, increased or decreased expression of the gene in affected individuals as compared to unaffected individuals can be assessed using the polynucleotides of the invention. Any of these alterations (altered expression, chromosomal rearrangement, or mutation) can be used as a diagnostic or prognostic marker. Diagnostic and prognostic methods, kits and reagents encompassed by the present invention are briefly described below and more thoroughly elsewhere herein (see e.g., the sections labeled “Antibodies”, “Diagnostic Assays”, and “Methods for Detecting Diseases”).

[0395] Thus, the invention also provides a diagnostic method useful during diagnosis of a disorder, involving measuring the expression level of polynucleotides of the present invention in cells or body fluid from an individual and comparing the measured gene expression level with a standard level of polynucleotide expression level, whereby an increase or decrease in the gene expression level compared to the standard is indicative of a disorder. Additional non-limiting examples of diagnostic methods encompassed by the present invention are more thoroughly described elsewhere herein (see, e.g., Example 12).

[0396] In still another embodiment, the invention includes a kit for analyzing samples for the presence of proliferative and/or cancerous polynucleotides derived from a test subject. In a general embodiment, the kit includes at least one polynucleotide probe containing a nucleotide sequence that will specifically hybridize with a polynucleotide of the invention and a suitable container. In a specific embodiment, the kit includes two polynucleotide probes defining an internal region of the polynucleotide of the invention, where each probe has one strand containing a 31′mer-end internal to the region. In a further embodiment, the probes may be useful as primers for polymerase chain reaction amplification.

[0397] Where a diagnosis of a related disorder, including, for example, diagnosis of a tumor, has already been made according to conventional methods, the present invention is useful as a prognostic indicator, whereby patients exhibiting enhanced or depressed polynucleotide of the invention expression will experience a worse clinical outcome relative to patients expressing the gene at a level nearer the standard level.

[0398] By “measuring the expression level of polynucleotides of the invention” is intended qualitatively or quantitatively measuring or estimating the level of the polypeptide of the invention or the level of the mRNA encoding the polypeptide of the invention in a first biological sample either directly (e.g., by determining or estimating absolute protein level or mRNA level) or relatively (e.g., by comparing to the polypeptide level or mRNA level in a second biological sample). Preferably, the polypeptide level or mRNA level in the first biological sample is measured or estimated and compared to a standard polypeptide level or mRNA level, the standard being taken from a second biological sample obtained from an individual not having the related disorder or being determined by averaging levels from a population of individuals not having a related disorder. As will be appreciated in the art, once a standard polypeptide level or mRNA level is known, it can be used repeatedly as a standard for comparison.

[0399] By “biological sample” is intended any biological sample obtained from an individual, body fluid, cell line, tissue culture, or other source which contains polypeptide of the present invention or the corresponding mRNA. As indicated, biological samples include body fluids (such as semen, lymph, vaginal pool, sera, plasma, urine, synovial fluid and spinal fluid) which contain the polypeptide of the present invention, and tissue sources found to express the polypeptide of the present invention. Methods for obtaining tissue biopsies and body fluids from mammals are well known in the art. Where the biological sample is to include mRNA, a tissue biopsy is the preferred source.

[0400] The method(s) provided above may preferably be applied in a diagnostic method and/or kits in which polynucleotides and/or polypeptides of the invention are attached to a solid support. In one exemplary method, the support may be a “gene chip” or a “biological chip” as described in U.S. Pat. Nos. 5,837,832, 5,874,219, and 5,856,174. Further, such a gene chip with polynucleotides of the invention attached may be used to identify polymorphisms between the isolated polynucleotide sequences of the invention, with polynucleotides isolated from a test subject. The knowledge of such polymorphisms (i.e. their location, as well as, their existence) would be beneficial in identifying disease loci for many disorders, such as for example, in neural disorders, immune system disorders, muscular disorders, reproductive disorders, gastrointestinal disorders, pulmonary disorders, digestive disorders, metabolic disorders, cardiovascular disorders, renal disorders, proliferative disorders, and/or cancerous diseases and conditions. Such a method is described in U.S. Pat. Nos. 5,858,659 and 5,856,104. The US Patents referenced supra are hereby incorporated by reference in their entirety herein.

[0401] The present invention encompasses polynucleotides of the present invention that are chemically synthesized, or reproduced as peptide nucleic acids (PNA), or according to other methods known in the art. The use of PNAs would serve as the preferred form if the polynucleotides of the invention are incorporated onto a solid support, or gene chip. For the purposes of the present invention, a peptide nucleic acid (PNA) is a polyamide type of DNA analog and the monomeric units for adenine, guanine, thymine and cytosine are available commercially (Perceptive Biosystems). Certain components of DNA, such as phosphorus, phosphorus oxides, or deoxyribose derivatives, are not present in PNAs. As disclosed by Nielsen et al., Science 254, 1497 (1991); and Egholm et al., Nature 365, 666 (1993), PNAs bind specifically and tightly to complementary DNA strands and are not degraded by nucleases. In fact, PNA binds more strongly to DNA than DNA itself does. This is probably because there is no electrostatic repulsion between the two strands, and also the polyamide backbone is more flexible. Because of this, PNA/DNA duplexes bind under a wider range of stringency conditions than DNA/DNA duplexes, making it easier to perform multiplex hybridization. Smaller probes can be used than with DNA due to the strong binding. In addition, it is more likely that single base mismatches can be determined with PNA/DNA hybridization because a single mismatch in a PNA/DNA 15-mer lowers the melting point (T.sub.m) by 8°-20° C., vs. 4°-16° C. for the DNA/DNA 15-mer duplex. Also, the absence of charge groups in PNA means that hybridization can be done at low ionic strengths and reduce possible interference by salt during the analysis.

[0402] The compounds of the present invention have uses which include, but are not limited to, detecting cancer in mammals. In particular the invention is useful during diagnosis of pathological cell proliferative neoplasias which include, but are not limited to: acute myelogenous leukemias including acute monocytic leukemia, acute myeloblastic leukemia, acute promyelocytic leukemia, acute myelomonocytic leukemia, acute erythroleukemia, acute megakaryocytic leukemia, and acute undifferentiated leukemia, etc.; and chronic myelogenous leukemias including chronic myelomonocytic leukemia, chronic granulocytic leukemia, etc. Preferred mammals include monkeys, apes, cats, dogs, cows, pigs, horses, rabbits and humans. Particularly preferred are humans.

[0403] Pathological cell proliferative disorders are often associated with inappropriate activation of proto-oncogenes. (Gelmann, E. P. et al., “The Etiology of Acute Leukemia: Molecular Genetics and Viral Oncology,” in Neoplastic Diseases of the Blood, Vol 1., Wiemik, P. H. et al. eds., 161-182 (1985)). Neoplasias are now believed to result from the qualitative alteration of a normal cellular gene product, or from the quantitative modification of gene expression by insertion into the chromosome of a viral sequence, by chromosomal translocation of a gene to a more actively transcribed region, or by some other mechanism. (Gelmann et al., supra) It is likely that mutated or altered expression of specific genes is involved in the pathogenesis of some leukemias, among other tissues and cell types. (Gelmann et al., supra) Indeed, the human counterparts of the oncogenes involved in some animal neoplasias have been amplified or translocated in some cases of human leukemia and carcinoma. (Gelmann et al., supra)

[0404] For example, c-myc expression is highly amplified in the non-lymphocytic leukemia cell line HL-60. When HL-60 cells are chemically induced to stop proliferation, the level of c-myc is found to be downregulated. (International Publication Number WO 91/15580). However, it has been shown that exposure of HL-60 cells to a DNA construct that is complementary to the 5′ end of c-myc or c-myb blocks translation of the corresponding mRNAs which downregulates expression of the c-myc or c-myb proteins and causes arrest of cell proliferation and differentiation of the treated cells. (International Publication Number WO 91/15580; Wickstrom et al., Proc. Natl. Acad. Sci. 85:1028 (1988); Anfossi et al., Proc. Natl. Acad. Sci. 86:3379 (1989)). However, the skilled artisan would appreciate the present invention's usefulness is not be limited to treatment, prevention, and/or prognosis of proliferative disorders of cells and tissues of hematopoietic origin, in light of the numerous cells and cell types of varying origins which are known to exhibit proliferative phenotypes.

[0405] In addition to the foregoing, a polynucleotide of the present invention can be used to control gene expression through triple helix formation or through antisense DNA or RNA. Antisense techniques are discussed, for example, in Okano, J. Neurochem. 56: 560 (1991); “Oligodeoxynucleotides as Antisense Inhibitors of Gene Expression, CRC Press, Boca Raton, Fla. (1988). Triple helix formation is discussed in, for instance Lee et al., Nucleic Acids Research 6: 3073 (1979); Cooney et al., Science 241: 456 (1988); and Dervan et al., Science 251: 1360 (1991). Both methods rely on binding of the polynucleotide to a complementary DNA or RNA. For these techniques, preferred polynucleotides are usually oligonucleotides 20 to 40 bases in length and complementary to either the region of the gene involved in transcription (triple helix—see Lee et al., Nucl. Acids Res. 6:3073 (1979); Cooney et al., Science 241:456 (1988); and Dervan et al., Science 251:1360 (1991)) or to the mRNA itself (antisense—Okano, J. Neurochem. 56:560 (1991); Oligodeoxy-nucleotides as Antisense Inhibitors of Gene Expression, CRC Press, Boca Raton, FL (1988)). Triple helix formation optimally results in a shut-off of RNA transcription from DNA, while antisense RNA hybridization blocks translation of an mRNA molecule into polypeptide. The oligonucleotide described above can also be delivered to cells such that the antisense RNA or DNA may be expressed in vivo to inhibit production of polypeptide of the present invention antigens. Both techniques are effective in model systems, and the information disclosed herein can be used to design antisense or triple helix polynucleotides in an effort to treat disease, and in particular, for the treatment of proliferative diseases and/or conditions. Non-limiting antisense and triple helix methods encompassed by the present invention are more thoroughly described elsewhere herein (see, e.g., the section labeled “Antisense and Ribozyme (Antagonists)”).

[0406] Polynucleotides of the present invention are also useful in gene therapy. One goal of gene therapy is to insert a normal gene into an organism having a defective gene, in an effort to correct the genetic defect. The polynucleotides disclosed in the present invention offer a means of targeting such genetic defects in a highly accurate manner. Another goal is to insert a new gene that was not present in the host genome, thereby producing a new trait in the host cell. Additional non-limiting examples of gene therapy methods encompassed by the present invention are more thoroughly described elsewhere herein (see, e.g., the sections labeled “Gene Therapy Methods”, and Examples 16, 17 and 18).

[0407] The polynucleotides are also useful for identifying individuals from minute biological samples. The United States military, for example, is considering the use of restriction fragment length polymorphism (RFLP) for identification of its personnel. In this technique, an individual's genomic DNA is digested with one or more restriction enzymes, and probed on a Southern blot to yield unique bands for identifying personnel. This method does not suffer from the current limitations of “Dog Tags” which can be lost, switched, or stolen, making positive identification difficult. The polynucleotides of the present invention can be used as additional DNA markers for RFLP.

[0408] The polynucleotides of the present invention can also be used as an alternative to RFLP, by determining the actual base-by-base DNA sequence of selected portions of an individual's genome. These sequences can be used to prepare PCR primers for amplifying and isolating such selected DNA, which can then be sequenced. Using this technique, individuals can be identified because each individual will have a unique set of DNA sequences. Once an unique ID database is established for an individual, positive identification of that individual, living or dead, can be made from extremely small tissue samples.

[0409] Forensic biology also benefits from using DNA-based identification techniques as disclosed herein. DNA sequences taken from very small biological samples such as tissues, e.g., hair or skin, or body fluids, e.g., blood, saliva, semen, synovial fluid, amniotic fluid, breast milk, lymph, pulmonary sputum or surfactant, urine, fecal matter, etc., can be amplified using PCR. In one prior art technique, gene sequences amplified from polymorphic loci, such as DQa class II HLA gene, are used in forensic biology to identify individuals. (Erlich, H., PCR Technology, Freeman and Co. (1992)). Once these specific polymorphic loci are amplified, they are digested with one or more restriction enzymes, yielding an identifying set of bands on a Southern blot probed with DNA corresponding to the DQa class II HLA gene. Similarly, polynucleotides of the present invention can be used as polymorphic markers for forensic purposes.

[0410] There is also a need for reagents capable of identifying the source of a particular tissue. Such need arises, for example, in forensics when presented with tissue of unknown origin. Appropriate reagents can comprise, for example, DNA probes or primers prepared from the sequences of the present invention, specific to tissues, including but not limited to those shown in Table 1A. Panels of such reagents can identify tissue by species and/or by organ type. In a similar fashion, these reagents can be used to screen tissue cultures for contamination. Additional non-limiting examples of such uses are further described herein.

[0411] The polynucleotides of the present invention are also useful as hybridization probes for differential identification of the tissue(s) or cell type(s) present in a biological sample. Similarly, polypeptides and antibodies directed to polypeptides of the present invention are useful to provide immunological probes for differential identification of the tissue(s) (e.g., immunohistochemistry assays) or cell type(s) (e.g., immunocytochemistry assays). In addition, for a number of disorders of the above tissues or cells, significantly higher or lower levels of gene expression of the polynucleotides/polypeptides of the present invention may be detected in certain tissues (e.g., tissues expressing polypeptides and/or polynucleotides of the present invention, for example, those disclosed in column 8 of Table 1A, and/or cancerous and/or wounded tissues) or bodily fluids (e.g., semen, lymph, vaginal pool, serum, plasma, urine, synovial fluid or spinal fluid) taken from an individual having such a disorder, relative to a “standard” gene expression level, i.e., the expression level in healthy tissue from an individual not having the disorder.

[0412] Thus, the invention provides a diagnostic method of a disorder, which involves: (a) assaying gene expression level in cells or body fluid of an individual; (b) comparing the gene expression level with a standard gene expression level, whereby an increase or decrease in the assayed gene expression level compared to the standard expression level is indicative of a disorder.

[0413] In the very least, the polynucleotides of the present invention can be used as molecular weight markers on Southern gels, as diagnostic probes for the presence of a specific mRNA in a particular cell type, as a probe to “subtract-out” known sequences in the process of discovering novel polynucleotides, for selecting and making oligomers for attachment to a “gene chip” or other support, to raise anti-DNA antibodies using DNA immunization techniques, and as an antigen to elicit an immune response.

[0414] Uses of the Polypeptides

[0415] Each of the polypeptides identified herein can be used in numerous ways. The following description should be considered exemplary and utilizes known techniques.

[0416] Polypeptides and antibodies directed to polypeptides of the present invention are useful to provide immunological probes for differential identification of the tissue(s) (e.g., immunohistochemistry assays such as, for example, ABC immunoperoxidase (Hsu et al., J. Histochem. Cytochem. 29:577-580 (1981)) or cell type(s) (e.g., immunocytochemistry assays).

[0417] Antibodies can be used to assay levels of polypeptides encoded by polynucleotides of the invention in a biological sample using classical immunohistological methods known to those of skill in the art (e.g., see Jalkanen, et al., J. Cell. Biol. 101:976-985 (1985); Jalkanen, et al., J. Cell. Biol. 105:3087-3096 (1987)). Other antibody-based methods useful for detecting protein gene expression include immunoassays, such as the enzyme linked immunosorbent assay (ELISA) and the radioimmunoassay (RIA). Suitable antibody assay labels are known in the art and include enzyme labels, such as, glucose oxidase; radioisotopes, such as iodine (¹³¹I, ¹²⁵I, ¹²³I, ¹²¹I), carbon (¹⁴C), sulfur (³⁵S), tritium (³H), indium (^{115m}In, ^{113m}In, ¹¹²In, ¹¹¹In), and technetium (⁹⁹Tc, ^{99m}Tc), thallium (²⁰¹Ti), gallium (⁶⁸Ga, ⁶⁷Ga), palladium (¹⁰³Pd), molybdenum (⁹⁹Mo), xenon (¹³³Xe), fluorine (¹⁸F), ¹⁵³Sm, ¹⁷⁷Lu, ¹⁵⁹Gd, ¹⁴⁹Pm, ¹⁴⁰La, ¹⁷⁵Yb, ¹⁶⁶Ho, ⁹⁰Y, ⁴⁷Sc, ¹⁸⁶Re, ¹⁸⁸Re, ¹⁴²Pr, ¹⁰⁵Rh, ⁹⁷Ru; luminescent labels, such as luminol; and fluorescent labels, such as fluorescein and rhodamine, and biotin.

[0418] In addition to assaying levels of polypeptide of the present invention in a biological sample, proteins can also be detected in vivo by imaging. Antibody labels or markers for in vivo imaging of protein include those detectable by X-radiography, NMR or ESR. For X-radiography, suitable labels include radioisotopes such as barium or cesium, which emit detectable radiation but are not overtly harmful to the subject. Suitable markers for NMR and ESR include those with a detectable characteristic spin, such as deuterium, which may be incorporated into the antibody by labeling of nutrients for the relevant hybridoma.

[0419] A protein-specific antibody or antibody fragment which has been labeled with an appropriate detectable imaging moiety, such as a radioisotope (for example, ¹³¹I, ¹¹²In, ^{99m}Tc, (¹³¹I, ¹²⁵I, ¹²³I, ¹²¹I), carbon (¹⁴C), sulfur (³⁵S), tritium (³H), indium (^{115m}In, ^{113m}In, ¹¹²In, ¹¹¹In), and technetium (⁹⁹Tc, ^{99m}Tc), thallium (²⁰¹Ti), gallium (⁶⁸Ga, ⁶⁷Ga), palladium (¹⁰³Pd), molybdenum (⁹⁹Mo), xenon (¹³³Xe), fluorine (¹⁸F, ¹⁵³Sm, ¹⁷⁷Lu, ¹⁵⁹Gd, ¹⁴⁹Pm , ¹⁴⁰La, 175Yb, ¹⁶⁶Ho, ⁹⁰Y, ⁴⁷Sc, ¹⁸⁶Re, ¹⁸⁸Re, ¹⁴²Pr, ¹⁰⁵Rh, ⁹⁷Ru), a radio-opaque substance, or a material detectable by nuclear magnetic resonance, is introduced (for example, parenterally, subcutaneously or intraperitoneally) into the mammal to be examined for immune system disorder. It will be understood in the art that the size of the subject and the imaging system used will determine the quantity of imaging moiety needed to produce diagnostic images. In the case of a radioisotope moiety, for a human subject, the quantity of radioactivity injected will normally range from about 5 to 20 millicuries of ^{99m}Tc. The labeled antibody or antibody fragment will then preferentially accumulate at the location of cells which express the polypeptide encoded by a polynucleotide of the invention. In vivo tumor imaging is described in S. W. Burchiel et al., “Immunopharmacokinetics of Radiolabeled Antibodies and Their Fragments” (Chapter 13 in Tumor Imaging: The Radiochemical Detection of Cancer, S. W. Burchiel and B. A. Rhodes, eds., Masson Publishing Inc. (1982)).

[0420] In one embodiment, the invention provides a method for the specific delivery of compositions of the invention to cells by administering polypeptides of the invention (e.g., polypeptides encoded by polynucleotides of the invention and/or antibodies) that are associated with heterologous polypeptides or nucleic acids. In one example, the invention provides a method for delivering a therapeutic protein into the targeted cell. In another example, the invention provides a method for delivering a single stranded nucleic acid (e.g., antisense or ribozymes) or double stranded nucleic acid (e.g., DNA that can integrate into the cell's genome or replicate episomally and that can be transcribed) into the targeted cell.

[0421] In another embodiment, the invention provides a method for the specific destruction of cells (e.g., the destruction of tumor cells) by administering polypeptides of the invention in association with toxins or cytotoxic prodrugs.

[0422] By “toxin” is meant one or more compounds that bind and activate endogenous cytotoxic effector systems, radioisotopes, holotoxins, modified toxins, catalytic subunits of toxins, or any molecules or enzymes not normally present in or on the surface of a cell that under defined conditions cause the cell's death. Toxins that may be used according to the methods of the invention include, but are not limited to, radioisotopes known in the art, compounds such as, for example, antibodies (or complement fixing containing portions thereof) that bind an inherent or induced endogenous cytotoxic effector system, thymidine kinase, endonuclease, RNAse, alpha toxin, ricin, abrin, Pseudomonas exotoxin A, diphtheria toxin, saporin, momordin, gelonin, pokeweed antiviral protein, alpha-sarcin and cholera toxin. “Toxin” also includes a cytostatic or cytocidal agent, a therapeutic agent or a 213 radioactive metal ion, e.g., alpha-emitters such as, for example, Bi, or other radioisotopes such as, forexample, ¹⁰³Pd ¹³³Xe, ¹³¹I, ⁶⁸Ge ⁵⁷Co, ⁶⁵Z ⁸⁵S ³²P, 35S, ⁹⁰Y, ¹⁵³Sm, ¹⁵³Gd, ¹⁶⁹Yb, ⁵¹Cr, ⁵⁴Mn, ⁷⁵Se, ¹¹³Sn, ⁹⁰Yttrium, ¹¹⁷Tin, ¹⁸⁶Rhenium, ¹⁶⁶Holmium, and ¹⁸⁸Rhenium; luminescent labels, such as luminol; and fluorescent labels, such as fluorescein and rhodamine, and biotin. In a specific embodiment, the invention provides a method for the specific destruction of cells (e.g., the destruction of tumor cells) by administering polypeptides of the invention or antibodies of the invention in association with the radioisotope ⁹⁰Y. In another specific embodiment, the invention provides a method for the specific destruction of cells (e.g., the destruction of tumor cells) by administering polypeptides of the invention or antibodies of the invention in association with the radioisotope ¹¹¹In. In a further specific embodiment, the invention provides a method for the specific destruction of cells (e.g., the destruction of tumor cells) by administering polypeptides of the invention or antibodies of the invention in association with the radioisotope ¹³¹I.

[0423] Techniques known in the art may be applied to label polypeptides of the invention (including antibodies). Such techniques include, but are not limited to, the use of bifunctional conjugating agents (see e.g., U.S. Pat. Nos. 5,756,065; 5,714,631; 5,696,239; 5,652,361; 5,505,931; 5,489,425; 5,435,990; 5,428,139; 5,342,604; 5,274,119; 4,994,560; and 5,808,003; the contents of each of which are hereby incorporated by reference in its entirety).

[0424] Thus, the invention provides a diagnostic method of a disorder, which involves (a) assaying the expression level of a polypeptide of the present invention in cells or body fluid of an individual; and (b) comparing the assayed polypeptide expression level with a standard polypeptide expression level, whereby an increase or decrease in the assayed polypeptide expression level compared to the standard expression level is indicative of a disorder. With respect to cancer, the presence of a relatively high amount of transcript in biopsied tissue from an individual may indicate a predisposition for the development of the disease, or may provide a means for detecting the disease prior to the appearance of actual clinical symptoms. A more definitive diagnosis of this type may allow health professionals to employ preventative measures or aggressive treatment earlier thereby preventing the development or further progression of the cancer.

[0425] Moreover, polypeptides of the present invention can be used to treat or prevent diseases or conditions such as, for example, neural disorders, immune system disorders, muscular disorders, reproductive disorders, gastrointestinal disorders, pulmonary disorders, cardiovascular disorders, renal disorders, proliferative disorders, and/or cancerous diseases and conditions. For example, patients can be administered a polypeptide of the present invention in an effort to replace absent or decreased levels of the polypeptide (e.g., insulin), to supplement absent or decreased levels of a different polypeptide (e.g., hemoglobin S for hemoglobin B, SOD, catalase, DNA repair proteins), to inhibit the activity of a polypeptide (e.g., an oncogene or tumor supressor), to activate the activity of a polypeptide (e.g., by binding to a receptor), to reduce the activity of a membrane bound receptor by competing with it for free ligand (e.g., soluble TNF receptors used in reducing inflammation), or to bring about a desired response (e.g., blood vessel growth inhibition, enhancement of the immune response to proliferative cells or tissues).

[0426] Similarly, antibodies directed to a polypeptide of the present invention can also be used to treat disease (as described supra, and elsewhere herein). For example, administration of an antibody directed to a polypeptide of the present invention can bind, and/or neutralize the polypeptide, and/or reduce overproduction of the polypeptide. Similarly, administration of an antibody can activate the polypeptide, such as by binding to a polypeptide bound to a membrane (receptor).

[0427] At the very least, the polypeptides of the present invention can be used as molecular weight markers on SDS-PAGE gels or on molecular sieve gel filtration columns using methods well known to those of skill in the art. Polypeptides can also be used to raise antibodies, which in turn are used to measure protein expression from a recombinant cell, as a way of assessing transformation of the host cell. Moreover, the polypeptides of the present invention can be used to test the biological activities described herein.

[0428] Diagnostic Assays

[0429] The compounds of the present invention are useful for diagnosis, treatment, prevention and/or prognosis of various disorders in mammals, preferably humans. Such disorders include, but are not limited to, those described herein under the section heading “Biological Activities”.

[0430] For a number of disorders, substantially altered (increased or decreased) levels of gene expression can be detected in tissues, cells or bodily fluids (e.g., sera, plasma, urine, semen, synovial fluid or spinal fluid) taken from an individual having such a disorder, relative to a “standard” gene expression level, that is, the expression level in tissues or bodily fluids from an individual not having the disorder. Thus, the invention provides a diagnostic method useful during diagnosis of a disorder, which involves measuring the expression level of the gene encoding the polypeptide in tissues, cells or body fluid from an individual and comparing the measured gene expression level with a standard gene expression level, whereby an increase or decrease in the gene expression level(s) compared to the standard is indicative of a disorder. These diagnostic assays may be performed in vivo or in vitro, such as, for example, on blood samples, biopsy tissue or autopsy tissue.

[0431] The present invention is also useful as a prognostic indicator, whereby patients exhibiting enhanced or depressed gene expression will experience a worse clinical outcome relative to patients expressing the gene at a level nearer the standard level.

[0432] In certain embodiments, a polypeptide of the invention, or polynucleotides, antibodies, agonists, or antagonists corresponding to that polypeptide, may be used to diagnose and/or prognose diseases and/or disorders associated with the tissue(s) in which the polypeptide of the invention is expressed, including one, two, three, four, five, or more tissues disclosed in Table 1A, column 8 (Tissue Distribution Library Code).

[0433] By “assaying the expression level of the gene encoding the polypeptide” is intended qualitatively or quantitatively measuring or estimating the level of the polypeptide of the invention or the level of the mRNA encoding the polypeptide of the invention in a first biological sample either directly (e.g., by determining or estimating absolute protein level or mRNA level) or relatively (e.g., by comparing to the polypeptide level or mRNA level in a second biological sample). Preferably, the polypeptide expression level or mRNA level in the first biological sample is measured or estimated and compared to a standard polypeptide level or mRNA level, the standard being taken from a second biological sample obtained from an individual not having the disorder or being determined by averaging levels from a population of individuals not having the disorder. As will be appreciated in the art, once a standard polypeptide level or mRNA level is known, it can be used repeatedly as a standard for comparison.

[0434] By “biological sample” is intended any biological sample obtained from an individual, cell line, tissue culture, or other source containing polypeptides of the invention (including portions thereof) or mRNA. As indicated, biological samples include body fluids (such as sera, plasma, urine, synovial fluid and spinal fluid) and tissue sources found to express the full length or fragments thereof of a polypeptide or mRNA. Methods for obtaining tissue biopsies and body fluids from mammals are well known in the art. Where the biological sample is to include mRNA, a tissue biopsy is the preferred source.

[0435] Total cellular RNA can be isolated from a biological sample using any suitable technique such as the single-step guanidinium-thiocyanate-phenol-chloroform method described in Chomczynski and Sacchi, Anal. Biochem. 162:156-159 (1987). Levels of mRNA encoding the polypeptides of the invention are then assayed using any appropriate method. These include Northern blot analysis, SI nuclease mapping, the polymerase chain reaction (PCR), reverse transcription in combination with the polymerase chain reaction (RT-PCR), and reverse transcription in combination with the ligase chain reaction (RT-LCR).

[0436] The present invention also relates to diagnostic assays such as quantitative and diagnostic assays for detecting levels of polypeptides of the invention, in a biological sample (e.g., cells and tissues), including determination of normal and abnormal levels of polypeptides. Thus, for instance, a diagnostic assay in accordance with the invention for detecting over-expression of polypeptides of the invention compared to normal control tissue samples may be used to detect the presence of tumors. Assay techniques that can be used to determine levels of a polypeptide, such as a polypeptide of the present invention in a sample derived from a host are well-known to those of skill in the art. Such assay methods include radioimmunoassays, competitive-binding assays, Western Blot analysis and ELISA assays. Assaying polypeptide levels in a biological sample can occur using any art-known method.

[0437] Assaying polypeptide levels in a biological sample can occur using antibody-based techniques. For example, polypeptide expression in tissues can be studied with classical immunohistological methods (Jalkanen et al., J. Cell. Biol. 101:976-985 (1985); Jalkanen, M., et al., J. Cell . Biol. 105:3087-3096 (1987)). Other antibody-based methods useful for detecting polypeptide gene expression include immunoassays, such as the enzyme linked immunosorbent assay (ELISA) and the radioimmunoassay (RIA). Suitable antibody assay labels are known in the art and include enzyme labels, such as, glucose oxidase, and radioisotopes, such as iodine (¹²⁵I, ¹²¹I), carbon (¹⁴C), sulfur (³⁵S), tritium (³H), indium (¹¹²In), and technetium (^{99m}Tc), and fluorescent labels, such as fluorescein and rhodamine, and biotin.

[0438] The tissue or cell type to be analyzed will generally include those which are known, or suspected, to express the gene of inteest (such as, for example, cancer). The protein isolation methods employed herein may, for example, be such as those described in Harlow and Lane (Harlow, E. and Lane, D., 1988, “Antibodies: A Laboratory Manual”, Cold Spring Harbor Laboratory Press, Cold Spring Harbor, New York), which is incorporated herein by reference in its entirety. The isolated cells can be derived from cell culture or from a patient. The analysis of cells taken from culture may be a necessary step in the assessment of cells that could be used as part of a cell-based gene therapy technique or, alternatively, to test the effect of compounds on the expression of the gene.

[0439] For example, antibodies, or fragments of antibodies, such as those described herein, may be used to quantitatively or qualitatively detect the presence of gene products or conserved variants or peptide fragments thereof. This can be accomplished, for example, by immunofluorescence techniques employing a fluorescently labeled antibody coupled with light microscopic, flow cytometric, or fluorimetric detection.

[0440] In a preferred embodiment, antibodies, or fragments of antibodies directed to any one or all of the predicted epitope domains of the polypeptides of the invention (shown in column 7 of Table 1A) may be used to quantitatively or qualitatively detect the presence of gene products or conserved variants or peptide fragments thereof. This can be accomplished, for example, by immunofluorescence techniques employing a fluorescently labeled antibody coupled with light microscopic, flow cytometric, or fluorimetric detection.

[0441] In an additional preferred embodiment, antibodies, or fragments of antibodies directed to a conformational epitope of a polypeptide of the invention may be used to quantitatively or qualitatively detect the presence of gene products or conserved variants or peptide fragments thereof. This can be accomplished, for example, by immunofluorescence techniques employing a fluorescently labeled antibody coupled with light microscopic, flow cytometric, or fluorimetric detection.

[0442] The antibodies (or fragments thereof), and/or polypeptides of the present invention may, additionally, be employed histologically, as in immunofluorescence, immunoelectron microscopy or non-immunological assays, for in situ detection of gene products or conserved variants or peptide fragments thereof. In situ detection may be accomplished by removing a histological specimen from a patient, and applying thereto a labeled antibody or polypeptide of the present invention. The antibody (or fragment thereof) or polypeptide is preferably applied by overlaying the labeled antibody (or fragment) onto a biological sample. Through the use of such a procedure, it is possible to determine not only the presence of the gene product, or conserved variants or peptide fragments, or polypeptide binding, but also its distribution in the examined tissue. Using the present invention, those of ordinary skill will readily perceive that any of a wide variety of histological methods (such as staining procedures) can be modified in order to achieve such in situ detection.

[0443] Immunoassays and non-immunoassays for gene products or conserved variants or peptide fragments thereof will typically comprise incubating a sample, such as a biological fluid, a tissue extract, freshly harvested cells, or lysates of cells which have been incubated in cell culture, in the presence of a detectably labeled antibody capable of binding gene products or conserved variants or peptide fragments thereof, and detecting the bound antibody by any of a number of techniques well-known in the art.

[0444] The biological sample may be brought in contact with and immobilized onto a solid phase support or carrier such as nitrocellulose, or other solid support which is capable of immobilizing cells, cell particles or soluble proteins. The support may then be washed with suitable buffers followed by treatment with the detectably labeled antibody or detectable polypeptide of the invention. The solid phase support may then be washed with the buffer a second time to remove unbound antibody or polypeptide. Optionally the antibody is subsequently labeled. The amount of bound label on solid support may then be detected by conventional means.

[0445] By “solid phase support or carrier” is intended any support capable of binding an antigen or an antibody. Well-known supports or carriers include glass, polystyrene, polypropylene, polyethylene, dextran, nylon, amylases, natural and modified celluloses, polyacrylamides, gabbros, and magnetite. The nature of the carrier can be either soluble to some extent or insoluble for the purposes of the present invention. The support material may have virtually any possible structural configuration so long as the coupled molecule is capable of binding to an antigen or antibody. Thus, the support configuration may be spherical, as in a bead, or cylindrical, as in the inside surface of a test tube, or the external surface of a rod. Alternatively, the surface may be flat such as a sheet, test strip, etc. Preferred supports include polystyrene beads. Those skilled in the art will know many other suitable carriers for binding antibody or antigen, or will be able to ascertain the same by use of routine experimentation.

[0446] The binding activity of a given lot of antibody or antigen polypeptide may be determined according to well known methods. Those skilled in the art will be able to determine operative and optimal assay conditions for each determination by employing routine experimentation.

[0447] In addition to assaying polypeptide levels or polynucleotide levels in a biological sample obtained from an individual, polypeptide or polynucleotide can also be detected in vivo by imaging. For example, in one embodiment of the invention, polypeptides and/or antibodies of the invention are used to image diseased cells, such as neoplasms. In another embodiment, polynucleotides of the invention (e.g., polynucleotides complementary to all or a portion of an mRNA) and/or antibodies (e.g., antibodies directed to any one or a combination of the epitopes of a polypeptide of the invention, antibodies directed to a conformational epitope of a polypeptide of the invention, or antibodies directed to the full length polypeptide expressed on the cell surface of a mammalian cell) are used to image diseased or neoplastic cells.

[0448] Antibody labels or markers for in vivo imaging of polypeptides of the invention include those detectable by X-radiography, NMR, MRI, CAT-scans or ESR. For X-radiography, suitable labels include radioisotopes such as barium or cesium, which emit detectable radiation but are not overtly harmful to the subject. Suitable markers for NMR and ESR include those with a detectable characteristic spin, such as deuterium, which may be incorporated into the antibody by labeling of nutrients for the relevant hybridoma. Where in vivo imaging is used to detect enhanced levels of polypeptides for diagnosis in humans, it may be preferable to use human antibodies or “humanized” chimeric monoclonal antibodies. Such antibodies can be produced using techniques described herein or otherwise known in the art. For example methods for producing chimeric antibodies are known in the art. See, for review, Morrison, Science 229:1202 (1985); Oi et al., BioTechniques 4:214 (1986); Cabilly et al., U.S. Pat. No. 4,816,567; Taniguchi et al., EP 171496; Morrison et al., EP 173494; Neuberger et al., WO 8601533; Robinson et al., WO 8702671; Boulianne et al., Nature 312:643 (1984); Neuberger et al., Nature 314:268 (1985).

[0449] Additionally, any polypeptides of the invention whose presence can be detected, can be administered. For example, polypeptides of the invention labeled with a radio-opaque or other appropriate compound can be administered and visualized in vivo, as discussed, above for labeled antibodies. Further, such polypeptides can be utilized for in vitro diagnostic procedures.

[0450] A polypeptide-specific antibody or antibody fragment which has been labeled with an appropriate detectable imaging moiety, such as a radioisotope (for example, ¹³¹I, ¹¹²In, ^{99m}Tc), a radio-opaque substance, or a material detectable by nuclear magnetic resonance, is introduced (for example, parenterally, subcutaneously or intraperitoneally) into the mammal to be examined for a disorder. It will be understood in the art that the size of the subject and the imaging system used will determine the quantity of imaging moiety needed to produce diagnostic images. In the case of a radioisotope moiety, for a human subject, the quantity of radioactivity injected will normally range from about 5 to 20 millicuries of ^{99m}Tc. The labeled antibody or antibody fragment will then preferentially accumulate at the location of cells which contain the antigenic protein. In vivo tumor imaging is described in S. W. Burchiel et al., “Immunopharmacokinetics of Radiolabeled Antibodies and Their Fragments” (Chapter 13 in Tumor Imaging: The Radiochemical Detection of Cancer, S. W. Burchiel and B. A. Rhodes, eds., Masson Publishing Inc. (1982)).

[0451] With respect to antibodies, one of the ways in which an antibody of the present invention can be detectably labeled is by linking the same to a reporter enzyme and using the linked product in an enzyme immunoassay (EIA) (Voller, A., “The Enzyme Linked Immunosorbent Assay (ELISA)”, 1978, Diagnostic Horizons 2:1-7, Microbiological Associates Quarterly Publication, Walkersville, Md.); Voller et al., J. Clin. Pathol. 31:507-520 (1978); Butler, J. E., Meth. Enzymol. 73:482-523 (1981); Maggio, E. (ed.), 1980, Enzyme Immunoassay, CRC Press, Boca Raton, Fla.,; Ishikawa, E. et al., (eds.), 1981, Enzyme Immunoassay, Kgaku Shoin, Tokyo). The reporter enzyme which is bound to the antibody will react with an appropriate substrate, preferably a chromogenic substrate, in such a manner as to produce a chemical moiety which can be detected, for example, by spectrophotometric, fluorimetric or by visual means. Reporter enzymes which can be used to detectably label the antibody include, but are not limited to, malate dehydrogenase, staphylococcal nuclease, delta-5-steroid isomerase, yeast alcohol dehydrogenase, alpha-glycerophosphate, dehydrogenase, triose phosphate isomerase, horseradish peroxidase, alkaline phosphatase, asparaginase, glucose oxidase, beta-galactosidase, ribonuclease, urease, catalase, glucose-6-phosphate dehydrogenase, glucoamylase and acetylcholinesterase. Additionally, the detection can be accomplished by colorimetric methods which employ a chromogenic substrate for the reporter enzyme. Detection may also be accomplished by visual comparison of the extent of enzymatic reaction of a substrate in comparison with similarly prepared standards.

[0452] Detection may also be accomplished using any of a variety of other immunoassays. For example, by radioactively labeling the antibodies or antibody fragments, it is possible to detect polypeptides through the use of a radioimmunoassay (RIA) (see, for example, Weintraub, B., Principles of Radioimmunoassays, Seventh Training Course on Radioligand Assay Techniques, The Endocrine Society, March, 1986, which is incorporated by reference herein). The radioactive isotope can be detected by means including, but not limited to, a gamma counter, a scintillation counter, or autoradiography.

[0453] It is also possible to label the antibody with a fluorescent compound. When the fluorescently labeled antibody is exposed to light of the proper wave length, its presence can then be detected due to fluorescence. Among the most commonly used fluorescent labeling compounds are fluorescein isothiocyanate, rhodamine, phycoerythrin, phycocyanin, allophycocyanin, ophthaldehyde and fluorescamine.

[0454] The antibody can also be detectably labeled using fluorescence emitting metals such as ¹⁵²Eu, or others of the lanthanide series. These metals can be attached to the antibody using such metal chelating groups as diethylenetriaminepentacetic acid (DTPA) or ethylenediaminetetraacetic acid (EDTA).

[0455] The antibody also can be detectably labeled by coupling it to a chemiluminescent compound. The presence of the chemiluminescent-tagged antibody is then determined by detecting the presence of luminescence that arises during the course of a chemical reaction. Examples of particularly useful chemiluminescent labeling compounds are luminol, isoluminol, theromatic acridinium ester, imidazole, acridinium salt and oxalate ester.

[0456] Likewise, a bioluminescent compound may be used to label the antibody of the present invention. Bioluminescence is a type of chemiluminescence found in biological systems in, which a catalytic protein increases the efficiency of the chemiluminescent reaction. The presence of a bioluminescent protein is determined by detecting the presence of luminescence. Important bioluminescent compounds for purposes of labeling are luciferin, luciferase and aequorin.

[0457] Methods for Detecting Diseases, Including Cancer

[0458] In general, a disease may be detected in a patient based on the presence of one or more proteins of the invention and/or polynucleotides encoding such proteins in a biological sample (for example, blood, sera, urine, and/or tumor biopsies) obtained from the patient. In other words, such proteins may be used as markers to indicate the presence or absence of a disease or disorder, including cancer and/or as described elsewhere herein. In addition, such proteins may be useful for the detection of other diseases and cancers. The binding agents provided herein generally permit detection of the level of antigen that binds to the agent in the biological sample. Polynucleotide primers and probes may be used to detect the level of mRNA encoding polypeptides of the invention, which is also indicative of the presence or absence of a disease or disorder, including cancer. In general, polypeptides of the invention should be present at a level that is at least three fold higher in diseased tissue than in normal tissue.

[0459] There are a variety of assay formats known to those of ordinary skill in the art for using a binding agent to detect polypeptide markers in a sample. See, e.g., Harlow and Lane, supra. In general, the presence or absence of a disease in a patient may be determined by (a) contacting a biological sample obtained from a patient with a binding agent; (b) detecting in the sample a level of polypeptide that binds to the binding agent; and (c) comparing the level of polypeptide with a predetermined cut-off value.

[0460] In a preferred embodiment, the assay involves the use of a binding agent(s) immobilized on a solid support to bind to and remove the polypeptide of the invention from the remainder of the sample. The bound polypeptide may then be detected using a detection reagent that contains a reporter group and specifically binds to the binding agent/polypeptide complex. Such detection reagents may comprise, for example, a binding agent that specifically binds to the polypeptide or an antibody or other agent that specifically binds to the binding agent, such as an anti-immunoglobulin, protein G, protein A or a lectin. Alternatively, a competitive assay may be utilized, in which a polypeptide is labeled with a reporter group and allowed to bind to the immobilized binding agent after incubation of the binding agent with the sample. The extent to which components of the sample inhibit the binding of the labeled polypeptide to the binding agent is indicative of the reactivity of the sample with the immobilized binding agent. Suitable polypeptides for use within such assays include polypeptides of the invention and portions thereof, or antibodies, to which the binding agent binds, as described above.

[0461] The solid support may be any material known to those of skill in the art to which polypeptides of the invention may be attached. For example, the solid support may be a test well in a microtiter plate or a nitrocellulose or other suitable membrane. Alternatively, the support may be a bead or disc, such as glass fiberglass, latex or a plastic material such as polystyrene or polyvinylchloride. The support may also be a magnetic particle or a fiber optic sensor, such as those disclosed, for example, in U.S. Pat. No. 5,359,681. The binding agent may be immobilized on the solid support using a variety of techniques known to those of skill in the art, which are amply described in the patent and scientific literature. In the context of the present invention, the term “immobilization” refers to both noncovalent association, such as adsorption, and covalent attachment (which may be a direct linkage between the agent and functional groups on the support or may be a linkage by way of a cross-linking agent). Immobilization by adsorption to a well in a microtiter plate or to a membrane is preferred. In such cases, adsorption may be achieved by contacting the binding agent, in a suitable buffer, with the solid support for the suitable amount of time. The contact time varies with temperature, but is typically between about 1 hour and about 1 day. In general, contacting a well of plastic microtiter plate (such as polystyrene or polyvinylchloride) with an amount of binding agent ranging from about 10 ng to about 10 ug, and preferably about 100 ng to about 1 ug, is sufficient to immobilize an adequate amount of binding agent.

[0462] Covalent attachment of binding agent to a solid support may generally be achieved by first reacting the support with a bifunctional reagent that will react with both the support and a functional group, such as a hydroxyl or amino group, on the binding agent. For example, the binding agent may be covalently attached to supports having an appropriate polymer coating using benzoquinone or by condensation of an aldehyde group on the support with an amine and an active hydrogen on the binding partner (see, e.g., Pierce Immunotechnology Catalog and Handbook, 1991, at A12-A13).

[0463] Gene Therapy Methods

[0464] Also encompassed by the invention are gene therapy methods for treating or preventing disorders, diseases and conditions. The gene therapy methods relate to the introduction of nucleic acid (DNA, RNA and antisense DNA or RNA) sequences into an animal to achieve expression of the polypeptide of the present invention. This method requires a polynucleotide which codes for a polypeptide of the present invention operatively linked to a promoter and any other genetic elements necessary for the expression of the polypeptide by the target tissue. Such gene therapy and delivery techniques are known in the art, see, for example, WO90/11092, which is herein incorporated by reference.

[0465] Thus, for example, cells from a patient may be engineered with a polynucleotide (DNA or RNA) comprising a promoter operably linked to a polynucleotide of the present invention ex vivo, with the engineered cells then being provided to a patient to be treated with the polypeptide of the present invention. Such methods are well-known in the art. For example, see Belldegrun, A., et al., J. Natl. Cancer Inst. 85: 207-216 (1993); Ferrantini, M. et al., Cancer Research 53: 1107-1112 (1993); Ferrantini, M. et al., J. Immunology 153: 4604-4615 (1994); Kaido, T., et al., Int. J. Cancer 60: 221-229 (1995); Ogura, H., et al., Cancer Research 50: 5102-5106 (1990); Santodonato, L., et al., Human Gene Therapy 7:1-10 (1996); Santodonato, L., et al., Gene Therapy 4:1246-1255 (1997); and Zhang, J.-F. et al., Cancer Gene Therapy 3: 31-38 (1996)), which are herein incorporated by reference. In one embodiment, the cells which are engineered are arterial cells. The arterial cells may be reintroduced into the patient through direct injection to the artery, the tissues surrounding the artery, or through catheter injection.

[0466] As discussed in more detail below, the polynucleotide constructs can be delivered by any method that delivers injectable materials to the cells of an animal, such as, injection into the interstitial space of tissues (heart, muscle, skin, lung, liver, and the like). The polynucleotide constructs may be delivered in a pharmaceutically acceptable liquid or aqueous carrier.

[0467] In one embodiment, the polynucleotide of the present invention is delivered as a naked polynucleotide. The term “naked” polynucleotide, DNA or RNA refers to sequences that are free from any delivery vehicle that acts to assist, promote or facilitate entry into the cell, including viral sequences, viral particles, liposome formulations, lipofectin or precipitating agents and the like. However, the polynucleotide of the present invention can also be delivered in liposome formulations and lipofectin formulations and the like can be prepared by methods well known to those skilled in the art. Such methods are described, for example, in U.S. Pat. Nos. 5,593,972, 5,589,466, and 5,580,859, which are herein incorporated by reference.

[0468] The polynucleotide vector constructs used in the gene therapy method are preferably constructs that will not integrate into the host genome nor will they contain sequences that allow for replication. Appropriate vectors include pWLNEO, pSV2CAT, pOG44, pXTI and pSG available from Stratagene; pSVK3, pBPV, pMSG and pSVL available from Pharmacia; and pEF1/V5, pcDNA3.1, and pRc/CMV2 available from Invitrogen. Other suitable vectors will be readily apparent to the skilled artisan.

[0469] Any strong promoter known to those skilled in the art can be used for driving the expression of the polynucleotide sequence. Suitable promoters include adenoviral promoters, such as the adenoviral major late promoter; or heterologous promoters, such as the cytomegalovirus (CMV) promoter; the respiratory syncytial virus (RSV) promoter; inducible promoters, such as the MMT promoter, the metallothionein promoter; heat shock promoters; the albumin promoter; the ApoAl promoter; human globin promoters; viral thymidine kinase promoters, such as the Herpes Simplex thymidine kinase promoter; retroviral LTRs; the b-actin promoter; and human growth hormone promoters. The promoter also may be the native promoter for the polynucleotide of the present invention.

[0470] Unlike other gene therapy techniques, one major advantage of introducing naked nucleic acid sequences into target cells is the transitory nature of the polynucleotide synthesis in the cells. Studies have shown that non-replicating DNA sequences can be introduced into cells to provide production of the desired polypeptide for periods of up to six months.

[0471] The polynucleotide construct can be delivered to the interstitial space of tissues within the an animal, including of muscle, skin, brain, lung, liver, spleen, bone marrow, thymus, heart, lymph, blood, bone, cartilage, pancreas, kidney, gall bladder, stomach, intestine, testis, ovary, uterus, rectum, nervous system, eye, gland, and connective tissue. Interstitial space of the tissues comprises the intercellular, fluid, mucopolysaccharide matrix among the reticular fibers of organ tissues, elastic fibers in the walls of vessels or chambers, collagen fibers of fibrous tissues, or that same matrix within connective tissue ensheathing muscle cells or in the lacunae of bone. It is similarly the space occupied by the plasma of the circulation and the lymph fluid of the lymphatic channels. Delivery to the interstitial space of muscle tissue is preferred for the reasons discussed below. They may be conveniently delivered by injection into the tissues comprising these cells. They are preferably delivered to and expressed in persistent, non-dividing cells which are differentiated, although delivery and expression may be achieved in non-differentiated or less completely differentiated cells, such as, for example, stem cells of blood or skin fibroblasts. In vivo muscle cells are particularly competent in their ability to take up and express polynucleotides.

[0472] For the naked nucleic acid sequence injection, an effective dosage amount of DNA or RNA will be in the range of from about 0.05 mg/kg body weight to about 50 mg/kg body weight. Preferably the dosage will be from about 0.005 mg/kg to about 20 mg/kg and more preferably from about 0.05 mg/kg to about 5 mg/kg. Of course, as the artisan of ordinary skill will appreciate, this dosage will vary according to the tissue site of injection. The appropriate and effective dosage of nucleic acid sequence can readily be determined by those of ordinary skill in the art and may depend on the condition being treated and the route of administration.

[0473] The preferred route of administration is by the parenteral route of injection into the interstitial space of tissues. However, other parenteral routes may also be used, such as, inhalation of an aerosol formulation particularly for delivery to lungs or bronchial tissues, throat or mucous membranes of the nose. In addition, naked DNA constructs can be delivered to arteries during angioplasty by the catheter used in the procedure.

[0474] The naked polynucleotides are delivered by any method known in the art, including, but not limited to, direct needle injection at the delivery site, intravenous injection, topical administration, catheter infusion, and so-called “gene guns”. These delivery methods are known in the art.

[0475] The constructs may also be delivered with delivery vehicles such as viral sequences, viral particles, liposome formulations, lipofectin, precipitating agents, etc. Such methods of delivery are known in the art.

[0476] In certain embodiments, the polynucleotide constructs are complexed in a liposome preparation. Liposomal preparations for use in the instant invention include cationic (positively charged), anionic (negatively charged) and neutral preparations. However, cationic liposomes are particularly preferred because a tight charge complex can be formed between the cationic liposome and the polyanionic nucleic acid. Cationic liposomes have been shown to mediate intracellular delivery of plasmid DNA (Felgner et al., Proc. Natl. Acad. Sci. USA (1987) 84:7413-7416, which is herein incorporated by reference); mRNA (Malone et al., Proc. Natl. Acad. Sci. USA (1989) 86:6077-6081, which is herein incorporated by reference); and purified transcription factors (Debs et al., J. Biol. Chem. (1990) 265:10189-10192, which is herein incorporated by reference), in functional form.

[0477] Cationic liposomes are readily available. For example, N[1-2,3-dioleyloxy)propyl]-N,N,N-triethylammonium (DOTMA) liposomes are particularly useful and are available under the trademark Lipofectin, from GIBCO BRL, Grand Island, N.Y. (See, also, Felgner et al., Proc. Natl Acad. Sci. USA (1987) 84:7413-7416, which is herein incorporated by reference). Other commercially available liposomes include transfectace (DDAB/DOPE) and DOTAP/DOPE (Boehringer).

[0478] Other cationic liposomes can be prepared from readily available materials using techniques well known in the art. See, e.g. PCT Publication No. WO 90/11092 (which is herein incorporated by reference) for a description of the synthesis of DOTAP (1,2-bis(oleoyloxy)-3-(trimethylammonio)propane) liposomes. Preparation of DOTMA liposomes is explained in the literature, see, e.g., P. Felgner et al., Proc. Natl. Acad. Sci. USA 84:7413-7417, which is herein incorporated by reference. Similar methods can be used to prepare liposomes from other cationic lipid materials.

[0479] Similarly, anionic and neutral liposomes are readily available, such as from Avanti Polar Lipids (Birmingham, Ala.), or can be easily prepared using readily available materials. Such materials include phosphatidyl, choline, cholesterol, phosphatidyl ethanolamine, dioleoylphosphatidyl choline (DOPC), dioleoylphosphatidyl glycerol (DOPG), dioleoylphoshatidyl ethanolamine (DOPE), among others. These materials can also be mixed with the DOTMA and DOTAP starting materials in appropriate ratios. Methods for making liposomes using these materials are well known in the art.

[0480] For example, commercially dioleoylphosphatidyl choline (DOPC), dioleoylphosphatidyl glycerol (DOPG), and dioleoylphosphatidyl ethanolamine (DOPE) can be used in various combinations to make conventional liposomes, with or without the addition of cholesterol. Thus, for example, DOPG/DOPC vesicles can be prepared by drying 50 mg each of DOPG and DOPC under a stream of nitrogen gas into a sonication vial. The sample is placed under a vacuum pump overnight and is hydrated the following day with deionized water. The sample is then sonicated for 2 hours in a capped vial, using a Heat Systems model 350 sonicator equipped with an inverted cup (bath type) probe at the maximum setting while the bath is circulated at 15EC. Alternatively, negatively charged vesicles can be prepared without sonication to produce multilamellar vesicles or by extrusion through nucleopore membranes to produce unilamellar vesicles of discrete size. Other methods are known and available to those of skill in the art.

[0481] The liposomes can comprise multilamellar vesicles (MLVs), small unilamellar vesicles (SUVs), or large unilamellar vesicles (LUVs), with SUVs being preferred. The various liposome-nucleic acid complexes are prepared using methods well known in the art. See, e.g., Straubinger et al., Methods of Immunology (1983), 101:512-527, which is herein incorporated by reference. For example, MLVs containing nucleic acid can be prepared by depositing a thin film of phospholipid on the walls of a glass tube and subsequently hydrating with a solution of the material to be encapsulated. SUVs are prepared by extended sonication of MLVs to produce a homogeneous population of unilamellar liposomes. The material to be entrapped is added to a suspension of preformed MLVs and then sonicated. When using liposomes containing cationic lipids, the dried lipid film is resuspended in an appropriate solution such as sterile water or an isotonic buffer solution such as 10 mM Tris/NaCl, sonicated, and then the preformed liposomes are mixed directly with the DNA. The liposome and DNA form a very stable complex due to binding of the positively charged liposomes to the cationic DNA. SUVs find use with small nucleic acid fragments. LUVs are prepared by a number of methods, well known in the art. Commonly used methods include Ca²⁺-EDTA chelation (Papahadjopoulos et al., Biochim. Biophys. Acta (1975) 394:483; Wilson et al., Cell 17:77 (1979)); ether injection (Deamer, D. and Bangham, A., Biochim. Biophys. Acta 443:629 (1976); Ostro et al., Biochem. Biophys. Res. Commun. 76:836 (1977); Fraley et al., Proc. Natl. Acad. Sci. USA 76:3348 (1979)); detergent dialysis (Enoch, H. and Strittmatter, P., Proc. Natl. Acad. Sci. USA 76:145 (1979)); and reverse-phase evaporation (REV) (Fraley et al., J. Biol. Chem. 255:10431 (1980); Szoka, F. and Papahadjopoulos, D., Proc. Natl. Acad. Sci. USA 75:145 (1978); Schaefer-Ridder et al., Science 215:166 (1982)), which are herein incorporated by reference.

[0482] Generally, the ratio of DNA to liposomes will be from about 10:1 to about 1:10. Preferably, the ration will be from about 5:1 to about 1:5. More preferably, the ration will be about 3:1 to about 1:3. Still more preferably, the ratio will be about 1:1.

[0483] U.S. Pat. No. 5,676,954 (which is herein incorporated by reference) reports on the injection of genetic material, complexed with cationic liposomes carriers, into mice. U.S. Pat. Nos. 4,897,355, 4,946,787, 5,049,386, 5,459,127, 5,589,466, 5,693,622, 5,580,859, 5,703,055, and international publication no. WO 94/9469 (which are herein incorporated by reference) provide cationic lipids for use in transfecting DNA into cells and mammals. U.S. Pat. Nos. 5,589,466, 5,693,622, 5,580,859, 5,703,055, and international publication no. WO 94/9469 provide methods for delivering DNA-cationic lipid complexes to mammals.

[0484] In certain embodiments, cells are engineered, ex vivo or in vivo, using a retroviral particle containing RNA which comprises a sequence encoding a polypeptide of the present invention. Retroviruses from which the retroviral plasmid vectors may be derived include, but are not limited to, Moloney Murine Leukemia Virus, spleen necrosis virus, Rous sarcoma Virus, Harvey Sarcoma Virus, avian leukosis virus, gibbon ape leukemia virus, human immunodeficiency virus, Myeloproliferative Sarcoma Virus, and mammary tumor virus.

[0485] The retroviral plasmid vector is employed to transduce packaging cell lines to form producer cell lines. Examples of packaging cells which may be transfected include, but are not limited to, the PE501, PA317, R-2, R-AM, PA12, T19-14X, VT-19-17-H2, RCRE, RCRIP, GP+E-86, GP+envAm12, and DAN cell lines as described in Miller, Human Gene Therapy 1:5-14 (1990), which is incorporated herein by reference in its entirety. The vector may transduce the packaging cells through any means known in the art. Such means include, but are not limited to, electroporation, the use of liposomes, and CaPO₄ precipitation. In one alternative, the retroviral plasmid vector may be encapsulated into a liposome, or coupled to a lipid, and then administered to a host.

[0486] The producer cell line generates infectious retroviral vector particles which include polynucleotide encoding a polypeptide of the present invention. Such retroviral vector particles then may be employed, to transduce eukaryotic cells, either in vitro or in vivo. The transduced eukaryotic cells will express a polypeptide of the present invention.

[0487] In certain other embodiments, cells are engineered, ex vivo or in vivo, with polynucleotide contained in an adenovirus vector. Adenovirus can be manipulated such that it encodes and expresses a polypeptide of the present invention, and at the same time is inactivated in terms of its ability to replicate in a normal lytic viral life cycle. Adenovirus expression is achieved without integration of the viral DNA into the host cell chromosome, thereby alleviating concerns about insertional mutagenesis. Furthermore, adenoviruses have been used as live enteric vaccines for many years with an excellent safety profile (Schwartz et al. Am. Rev. Respir. Dis.109:233-238 (1974)). Finally, adenovirus mediated gene transfer has been demonstrated in a number of instances including transfer of alpha-1-antitrypsin and CFTR to the lungs of cotton rats (Rosenfeld, M. A. et al. (1991) Science 252:431-434; Rosenfeld et al., (1992) Cell 68:143-155). Furthermore, extensive studies to attempt to establish adenovirus as a causative agent in human cancer were uniformly negative (Green, M. et al. (1979) Proc. Natl. Acad. Sci. USA 76:6606).

[0488] Suitable adenoviral vectors useful in the present invention are described, for example, in Kozarsky and Wilson, Curr. Opin. Genet. Devel. 3:499-503 (1993); Rosenfeld et al., Cell 68:143-155 (1992); Engelhardt et al., Human Genet. Ther. 4:759-769 (1993); Yang et al., Nature Genet. 7:362-369 (1994); Wilson et al., Nature 365:691-692 (1993); and U.S. Pat. No. 5,652,224, which are herein incorporated by reference. For example, the adenovirus vector Ad2 is useful and can be grown in human 293 cells. These cells contain the El region of adenovirus and constitutively express Ela and Elb, which complement the defective adenoviruses by providing the products of the genes deleted from the vector. In addition to Ad2, other varieties of adenovirus (e.g., Ad3, Ad5, and Ad7) are also useful in the present invention.

[0489] Preferably, the adenoviruses used in the present invention are replication deficient. Replication deficient adenoviruses require the aid of a helper virus and/or packaging cell line to form infectious particles. The resulting virus is capable of infecting cells and can express a polynucleotide of interest which is operably linked to a promoter, but cannot replicate in most cells. Replication deficient adenoviruses may be deleted in one or more of all or a portion of the following genes: E1a, E1b, E3, E4, E2a, or L1 through L5.

[0490] In certain other embodiments, the cells are engineered, ex vivo or in vivo, using an adeno-associated virus (AAV). AAVs are naturally occurring defective viruses that require helper viruses to produce infectious particles (Muzyczka, N., Curr. Topics in Microbiol. Immunol. 158:97 (1992)). It is also one of the few viruses that may integrate its DNA into non-dividing cells. Vectors containing as little as 300 base pairs of AAV can be packaged and can integrate, but space for exogenous DNA is limited to about 4.5 kb. Methods for producing and using such AAVs are known in the art. See, for example, U.S. Pat. Nos. 5,139,941, 5,173,414, 5,354,678, 5,436,146, 5,474,935, 5,478,745, and 5,589,377.

[0491] For example, an appropriate AAV vector for use in the present invention will include all the sequences necessary for DNA replication, encapsidation, and host-cell integration. The polynucleotide construct is inserted into the AAV vector using standard cloning methods, such as those found in Sambrook et al., Molecular Cloning: A Laboratory Manual, Cold Spring Harbor Press (1989). The recombinant AAV vector is then transfected into packaging cells which are infected with a helper virus, using any standard technique, including lipofection, electroporation, calcium phosphate precipitation, etc. Appropriate helper viruses include adenoviruses, cytomegaloviruses, vaccinia viruses, or herpes viruses. Once the packaging cells are transfected and infected, they will produce infectious AAV viral particles which contain the polynucleotide construct. These viral particles are then used to transduce eukaryotic cells, either ex vivo or in vivo. The transduced cells will contain the polynucleotide construct integrated into its genome, and will express a polypeptide of the invention.

[0492] Another method of gene therapy involves operably associating heterologous control regions and endogenous polynucleotide sequences (e.g. encoding a polypeptide of the present invention) via homologous recombination (see, e.g., U.S. Pat. No. 5,641,670, issued Jun. 24, 1997; International Publication No. WO 96/29411, published Sep. 26, 1996; International Publication No. WO 94/12650, published Aug. 4, 1994; Koller et al., Proc. Natl. Acad. Sci. USA 86:8932-8935 (1989); and Zijlstra et al., Nature 342:435-438 (1989), which are herein encorporated by reference. This method involves the activation of a gene which is present in the target cells, but which is not normally expressed in the cells, or is expressed at a lower level than desired.

[0493] Polynucleotide constructs are made, using standard techniques known in the art, which contain the promoter with targeting sequences flanking the promoter. Suitable promoters are described herein. The targeting sequence is sufficiently complementary to an endogenous sequence to permit homologous recombination of the promoter-targeting sequence with the endogenous sequence. The targeting sequence will be sufficiently near the 5′ end of the desired endogenous polynucleotide sequence so the promoter will be operably linked to the endogenous sequence upon homologous recombination.

[0494] The promoter and the targeting sequences can be amplified using PCR. Preferably, the amplified promoter contains distinct restriction enzyme sites on the 5′ and 3′ ends. Preferably, the 3′ end of the first targeting sequence contains the same restriction enzyme site as the 5′ end of the amplified promoter and the 5′ end of the second targeting sequence contains the same restriction site as the 3′ end of the amplified promoter. The amplified promoter and targeting sequences are digested and ligated together.

[0495] The promoter-targeting sequence construct is delivered to the cells, either as naked polynucleotide, or in conjunction with transfection-facilitating agents, such as liposomes, viral sequences, viral particles, whole viruses, lipofection, precipitating agents, etc., described in more detail above. The P promoter-targeting sequence can be delivered by any method, included direct needle injection, intravenous injection, topical administration, catheter infusion, particle accelerators, etc. The methods are described in more detail below.

[0496] The promoter-targeting sequence construct is taken up by cells. Homologous recombination between the construct and the endogenous sequence takes place, such that an endogenous sequence is placed under the control of the promoter. The promoter then drives the expression of the endogenous sequence.

[0497] The polynucleotide encoding a polypeptide of the present invention may contain a secretory signal sequence that facilitates secretion of the protein. Typically, the signal sequence is positioned in the coding region of the polynucleotide to be expressed towards or at the 5′ end of the coding region. The signal sequence may be homologous or heterologous to the polynucleotide of interest and may be homologous or heterologous to the cells to be transfected. Additionally, the signal sequence may be chemically synthesized using methods known in the art.

[0498] Any mode of administration of any of the above-described polynucleotides constructs can be used so long as the mode results in the expression of one or more molecules in an amount sufficient to provide a therapeutic effect. This includes direct needle injection, systemic injection, catheter infusion, biolistic injectors, particle accelerators (i.e., “gene guns”), gelfoam sponge depots, other commercially available depot materials, osmotic pumps (e.g., Alza minipumps), oral or suppositorial solid (tablet or pill) pharmaceutical formulations, and decanting or topical applications during surgery. For example, direct injection of naked calcium phosphate-precipitated plasmid into rat liver and rat spleen or a protein-coated plasmid into the portal vein has resulted in gene expression of the foreign gene in the rat livers (Kaneda et al., Science 243:375 (1989)).

[0499] A preferred method of local administration is by direct injection. Preferably, a recombinant molecule of the present invention complexed with a delivery vehicle is administered by direct injection into or locally within the area of arteries. Administration of a composition locally within the area of arteries refers to injecting the composition centimeters and preferably, millimeters within arteries.

[0500] Another method of local administration is to contact a polynucleotide construct of the present invention in or around a surgical wound. For example, a patient can undergo surgery and the polynucleotide construct can be coated on the surface of tissue inside the wound or the construct can be injected into areas of tissue inside the wound.

[0501] Therapeutic compositions useful in systemic administration, include recombinant molecules of the present invention complexed to a targeted delivery vehicle of the present invention. Suitable delivery vehicles for use with systemic administration comprise liposomes comprising ligands for targeting the vehicle to a particular site. In specific embodiments, suitable delivery vehicles for use with systemic administration comprise liposomes comprising polypeptides of the invention for targeting the vehicle to a particular site.

[0502] Preferred methods of systemic administration, include intravenous injection, aerosol, oral and percutaneous (topical) delivery. Intravenous injections can be performed using methods standard in the art. Aerosol delivery can also be performed using methods standard in the art (see, for example, Stribling et al., Proc. Natl. Acad. Sci. USA 189:11277-11281, 1992, which is incorporated herein by reference). Oral delivery can be performed by complexing a polynucleotide construct of the present invention to a carrier capable of withstanding degradation by digestive enzymes in the gut of an animal. Examples of such carriers, include plastic capsules or tablets, such as those known in the art. Topical delivery can be performed by mixing a polynucleotide construct of the present invention with a lipophilic reagent (e.g., DMSO) that is capable of passing into the skin.

[0503] Determining an effective amount of substance to be delivered can depend upon a number of factors including, for example, the chemical structure and biological activity of the substance, the age and weight of the animal, the precise condition requiring treatment and its severity, and the route of administration. The frequency of treatments depends upon a number of factors, such as the amount of polynucleotide constructs administered per dose, as well as the health and history of the subject. The precise amount, number of doses, and timing of doses will be determined by the attending physician or veterinarian.

[0504] Therapeutic compositions of the present invention can be administered to any animal, preferably to mammals and birds. Preferred mammals include humans, dogs, cats, mice, rats, rabbits sheep, cattle, horses and pigs, with humans being particularly preferred.

[0505] Biological Activities

[0506] Polynucleotides or polypeptides, or agonists or antagonists of the present invention, can be used in assays to test for one or more biological activities. If these polynucleotides or polypeptides, or agonists or antagonists of the present invention, do exhibit activity in a particular assay, it is likely that these molecules may be involved in the diseases associated with the biological activity. Thus, the polynucleotides and polypeptides, and agonists or antagonists could be used to diagnose, prognose, prevent and/or treat the associated disease.

[0507] The plasma membrane associated polypeptides of the invention may, for example, (a) be involved in cell-cell interactions, cell-surface recognition, intercellular communication; (b) act as receptors; (c) provide structural links between the extracellular environment and the cytoskeleton-signaling network and thus help to regulate cell migration, differentiation, cell cycle progression, apoptosis, phagocytosis, ECM assembly, and metalloproteinase activity; or (d) be involved in transmembrane signal transduction and regulation of cellular proliferation, development, motility, and tumor cell growth and metastasis, in a number ofdifferent cell types.

[0508] In one embodiment, the invention provides a method for the specific delivery of compositions of the invention to cells by administering polypeptides of the invention (e.g., polypeptides of the invention or anti-polypeptide of the invention antibodies) that are associated with heterologous polypeptides or nucleic acids. In one example, the invention provides a method for delivering a therapeutic protein into the targeted cell. In another example, the invention provides a method for delivering a single stranded nucleic acid (e.g., antisense or ribozymes) or double stranded nucleic acid (e.g., DNA that can integrate into the cell's genome or replicate episomally and that can be transcribed) into the targeted cell.

[0509] In another embodiment, the invention provides a method for the specific destruction of cells (e.g., the destruction of tumor cells) by administering polypeptides of the invention (e.g., polypeptides of the invention or anti-polypeptides of the invention antibodies) in association with toxins or cytotoxic prodrugs.

[0510] By “toxin” is meant compounds that bind and activate endogenous cytotoxic effector systems, radioisotopes, holotoxins, modified toxins, catalytic subunits of toxins, cytotoxins (cytotoxic agents), or any molecules or enzymes not normally present in or on the surface of a cell that under defined conditions cause the cell's death. Toxins that may be used according to the methods of the invention include, but are not limited to, radioisotopes known in the art, compounds such as, for example, antibodies (or complement fixing containing portions thereof) that bind an inherent or induced endogenous cytotoxic effector system, thymidine kinase, endonuclease, RNAse, alpha toxin, ricin, abrin, Pseudomonas exotoxin A, diphtheria toxin, saporin, momordin, gelonin, pokeweed antiviral protein, alpha-sarcin and cholera toxin. “Toxin” also includes a cytostatic or cytocidal agent, a therapeutic agent or a radioactive metal ion, e.g., alpha-emitters such as, for example, ²¹³Bi, or other radioisotopes such as, for example, ¹⁰³Pd, ¹³³Xe, ¹³¹I, ⁶⁸Ge, ⁵⁷Co, ⁶⁵Zn, 85Sr, ³²P, 35S, ⁹⁰Y, ¹⁵³Sm, ¹⁵³Gd, ¹⁶⁹Yb, ⁵¹Cr, ⁵⁴Mn, ⁷⁵Se, ¹¹³Sn, ⁹⁰Yttrium, ¹¹⁷Tin, ¹⁸⁶Rhenium, ¹⁶⁶Holmium, and ¹⁸⁸Rhenium; luminescent labels, such as luminol; and fluorescent labels, such as fluorescein and rhodamine, and biotin.

[0511] Techniques known in the art may be applied to label antibodies of the invention. Such techniques include, but are not limited to, the use of bifunctional conjugating agents (see e.g., U.S. Pat. Nos. 5,756,065; 5,714,631; 5,696,239; 5,652,361; 5,505,931; 5,489,425; 5,435,990; 5,428,139; 5,342,604; 5,274,119; 4,994,560; and 5,808,003; the contents of each of which are hereby incorporated by reference in its entirety). A cytotoxin or cytotoxic agent includes any agent that is detrimental to cells. Examples include paclitaxol, cytochalasin B, gramicidin D, ethidium bromide, emetine, mitomycin, etoposide, tenoposide, vincristine, vinblastine, colchicin, doxorubicin, daunorubicin, dihydroxy anthracin dione, mitoxantrone, mithramycin, actinomycin D, 1-dehydrotestosterone, glucocorticoids, procaine, tetracaine, lidocaine, propranolol, and puromycin and analogs or homologs thereof. Therapeutic agents include, but are not limited to, antimetabolites (e.g., methotrexate, 6-mercaptopurine, 6-thioguanine, cytarabine, 5-fluorouracil decarbazine), alkylating agents (e.g., mechlorethamine, thioepa chlorambucil, melphalan, carmustine (BSNU) and lomustine (CCNU), cyclothosphamide, busulfan, dibromomannitol, streptozotocin, mitomycin C, and cis-dichlorodiamine platinum (II) (DDP) cisplatin), anthracyclines (e.g., daunorubicin (formerly daunomycin) and doxorubicin), antibiotics (e.g., dactinomycin (formerly actinomycin), bleomycin, mithramycin, and anthramycin (AMC)), and anti-mitotic agents (e.g., vincristine and vinblastine).

[0512] By “cytotoxic prodrug” is meant a non-toxic compound that is converted by an enzyme, normally present in the cell, into a cytotoxic compound. Cytotoxic prodrugs that may be used according to the methods of the invention include, but are not limited to, glutamyl derivatives of benzoic acid mustard alkylating agent, phosphate derivatives of etoposide or mitomycin C, cytosine arabinoside, daunorubisin, and phenoxyacetamide derivatives of doxorubicin.

[0513] It will be appreciated that conditions caused by a decrease in the standard or normal level of a polypeptide of the invention activity in an individual, particularly disorders of the immune system, can be treated by administration of polypeptides of the invention (e.g., in the form of soluble extracellular domain or cells expressing the complete protein) or agonist. Thus, the invention also provides a method of treatment of an individual in need of an increased level of polypeptide of the inention activity comprising administering to such an individual a pharmaceutical composition comprising an amount of an isolated polypeptides of the invention, or agonist thereof (e.g, an agonistic polypeptide of the invention antibody), effective to increase the polypeptide activity level in such an individual.

[0514] It will also be appreciated that conditions caused by a increase in the standard or normal level of polypeptide activity in an individual, particularly disorders of the immune system, can be treated by administration of polypeptides of the invention (e.g., in the form of soluble extracellular domain or cells expressing the complete protein) or antagonist (e.g, an antagonistic polypeptide antibody). Thus, the invention also provides a method of treatment of an individual in need of an dereased level of polypeptide activity comprising administering to such an individual a pharmaceutical composition comprising an amount of an isolated polypeptide, or antagonist thereof, effective to decrease the polypeptide activity level in such an individual.

[0515] In certain embodiments, a polypeptide of the invention, or polynucleotides, antibodies, agonists, or antagonists corresponding to that polypeptide, may be used to diagnose and/or prognose diseases and/or disorders associated with the tissue(s) in which the polypeptide of the invention is expressed, including one, two, three, four, five, or more tissues disclosed in Table 1A, column 8 (Tissue Distribution Library Code).

[0516] Thus, polynucleotides, translation products and antibodies of the invention are useful in the diagnosis, prognosis, prevention, and/or treatment of diseases and/or disorders associated with activities that include, but are not limited to, blood coagulation, fibrinolysis, complement activation, extracellular matrix turnover, cell migration and prohormone activation.

[0517] More generally, polynucleotides, translation products and antibodies corresponding to this gene may be useful for the diagnosis, prognosis, prevention, and/or treatment of diseases and/or disorders associated with the following systems.

[0518] Immune Activity

[0519] Polynucleotides, polypeptides, antibodies, and/or agonists or antagonists of the present invention may be useful in treating, preventing, diagnosing and/or prognosing diseases, disorders, and/or conditions of the immune system, by, for example, activating or inhibiting the proliferation, differentiation, or mobilization (chemotaxis) of immune cells. Immune cells develop through a process called hematopoiesis, producing myeloid (platelets, red blood cells, neutrophils, and macrophages) and lymphoid (B and T lymphocytes) cells from pluripotent stem cells. The etiology of these immune diseases, disorders, and/or conditions may be genetic, somatic, such as cancer and some autoimmune diseases, acquired (e.g., by chemotherapy or toxins), or infectious. Moreover, polynucleotides, polypeptides, antibodies, and/or agonists or antagonists of the present invention can be used as a marker or detector of a particular immune system disease or disorder.

[0520] In another embodiment, a polyp eptide of the invention, or polynucleotides, antibodies, agonists, or antagonists corresponding to that polyp eptide, may be used to treat diseases and disorders of the immune system and/or to inhibit or enhance an immune response generated by cells associated with the tissue(s) in which the polypeptide of the invention is expressed, including one, two, three, four, five, or more tissues disclosed in Table 1A, column 8 (Tissue Distribution Library Code).

[0521] Polynucleotides, polypeptides, antibodies, and/or agonists or antagonists of the present invention may be useful in treating, preventing, diagnosing, and/or prognosing immunodeficiencies, including both congenital and acquired immunodeficiencies. Examples of B cell immunodeficiencies in which immunoglobulin levels B cell function and/or B cell numbers are decreased include: X-linked agammaglobulinemia (Bruton's disease), X-linked infantile agammaglobulinemia, X-linked immunodeficiency with hyper IgM, non X-linked immunodeficiency with hyper IgM, X-linked lymphoproliferative syndrome (XLP), agammaglobulinemia including congenital and acquired agammaglobulinemia, adult onset agammaglobulinemia, late-onset agammaglobulinemia, dysgammaglobulinemia, hypogammaglobulinemia, unspecified hypogammaglobulinemia, recessive agammaglobulinemia (Swiss type), Selective IgM deficiency, selective IgA deficiency, selective IgG subclass deficiencies, IgG subclass deficiency (with or without IgA deficiency), Ig deficiency with increased IgM, IgG and IgA deficiency with increased IgM, antibody deficiency with normal or elevated Igs, Ig heavy chain deletions, kappa chain deficiency, B cell lymphoproliferative disorder (BLPD), common variable immunodeficiency (CVID), common variable immunodeficiency (CVI) (acquired), and transient hypogammaglobulinemia of infancy.

[0522] In specific embodiments, ataxia-telangiectasia or conditions associated with ataxia-telangiectasia are treated, prevented, diagnosed, and/or prognosing using the polypeptides or polynucleotides of the invention, and/or agonists or antagonists thereof.

[0523] Examples of congenital immunodeficiencies in which T cell and/or B cell function and/or number is decreased include, but are not limited to: DiGeorge anomaly, severe combined immunodeficiencies (SCID) (including, but not limited to, X-linked SCID, autosomal recessive SCID, adenosine deaminase deficiency, purine nucleoside phosphorylase (PNP) deficiency, Class II MHC deficiency (Bare lymphocyte syndrome), Wiskott-Aldrich syndrome, and ataxia telangiectasia), thymic hypoplasia, third and fourth pharyngeal pouch syndrome, 22q11.2 deletion, chronic mucocutaneous candidiasis, natural killer cell deficiency (NK), idiopathic CD4+ T-lymphocytopenia, immunodeficiency with predominant T cell defect (unspecified), and unspecified immunodeficiency of cell mediated immunity.

[0524] In specific embodiments, DiGeorge anomaly or conditions associated with DiGeorge anomaly are treated, prevented, diagnosed, and/or prognosed using polypeptides or polynucleotides of the invention, or antagonists or agonists thereof.

[0525] Other immunodeficiencies that may be treated, prevented, diagnosed, and/or prognosed using polypeptides or polynucleotides of the invention, and/or agonists or antagonists thereof, include, but are not limited to, chronic granulomatous disease, Chédiak-Higashi syndrome, myeloperoxidase deficiency, leukocyte glucose-6-phosphate dehydrogenase deficiency, X-linked lymphoproliferative syndrome (XLP), leukocyte adhesion deficiency, complement component deficiencies (including C1, C2, C3, C4, C5, C6, C7, C8 and/or C9 deficiencies), reticular dysgenesis, thymic alymphoplasia-aplasia, immunodeficiency with thymoma, severe congenital leukopenia, dysplasia with immunodeficiency, neonatal neutropenia, short limbed dwarfism, and Nezelof syndrome-combined immunodeficiency with Igs.

[0526] In a preferred embodiment, the immunodeficiencies and/or conditions associated with the immunodeficiencies recited above are treated, prevented, diagnosed and/or prognosed using polynucleotides, polypeptides, antibodies, and/or agonists or antagonists of the present invention.

[0527] In a preferred embodiment polynucleotides, polypeptides, antibodies, and/or agonists or antagonists of the present invention could be used as an agent to boost immunoresponsiveness among immunodeficient individuals. In specific embodiments, polynucleotides, polypeptides, antibodies, and/or agonists or antagonists of the present invention could be used as an agent to boost immunoresponsiveness among B cell and/or T cell immunodeficient individuals.

[0528] The polynucleotides, polypeptides, antibodies, and/or agonists or antagonists of the present invention may be useful in treating, preventing, diagnosing and/or prognosing autoimmune disorders. Many autoimmune disorders result from inappropriate recognition of self as foreign material by immune cells. This inappropriate recognition results in an immune response leading to the destruction of the host tissue. Therefore, the administration of polynucleoti des and polyp eptides of the invention that can inhibit an immune response, particularly the proliferation, differentiation, or chemotaxis of T-cells, may be an effective therapy in preventing autoimmune disorders.

[0529] Autoimmune diseases or disorders that may be treated, prevented, diagnosed and/or prognosed by polynucleotides, polypeptides, antibodies, and/or agonists or antagonists of the present invention include, but are not limited to, one or more of the following: systemic lupus erythematosus, rheumatoid arthritis, ankylosing spondylitis, multiple sclerosis, autoimmune thyroiditis, Hashimoto's thyroiditis, autoimmune hemolytic anemia, hemolytic anemia, thrombocytopenia, autoimmune thrombocytopenia purpura, autoimmune neonatal thrombocytopenia, idiopathic thrombocytopenia purpura, purpura (e.g., Henloch-Scoenlein purpura), autoimmunocytopenia, Goodpasture's syndrome, Pemphigus vulgaris, myasthenia gravis, Grave's disease (hyperthyroidism), and insulin-resistant diabetes mellitus.

[0530] Additional disorders that are likely to have an autoimmune component that may be treated, prevented, and/or diagnosed with the compositions of the invention include, but are not limited to, type II collagen-induced arthritis, antiphospholipid syndrome, dermatitis, allergic encephalomyelitis, myocarditis, relapsing polychondritis, rheumatic heart disease, neuritis, uveitis ophthalmia, polyendocrinopathies, Reiter's Disease, Stiff-Man Syndrome, autoimmune pulmonary inflammation, autism, Guillain-Barre Syndrome, insulin dependent diabetes mellitus, and autoimmune inflammatory eye disorders.

[0531] Additional disorders that are likely to have an autoimmune component that may be treated, prevented, diagnosed and/or prognosed with the compositions of the invention include, but are not limited to, scleroderma with anti-collagen antibodies (often characterized, e.g., by nucleolar and other nuclear antibodies), mixed connective tissue disease (often characterized, e.g., by antibodies to extractable nuclear antigens (e.g., ribonucleoprotein)), polymyositis (often characterized, e.g., by nonhistone ANA), pernicious anemia (often characterized, e.g., by antiparietal cell, microsomes, and intrinsic factor antibodies), idiopathic Addison's disease (often characterized, e.g., by humoral and cell-mediated adrenal cytotoxicity, infertility (often characterized, e.g., by antispermatozoal antibodies), glomerulonephritis (often characterized, e.g., by glomerular basement membrane antibodies or immune complexes), bullous pemphigoid (often characterized, e.g., by IgG and complement in basement membrane), Sjogren's syndrome (often characterized, e.g., by multiple tissue antibodies, and/or a specific nonhistone ANA (SS-B)), diabetes mellitus (often characterized, e.g., by cell-mediated and humoral islet cell antibodies), and adrenergic drug resistance (including adrenergic drug resistance with asthma or cystic fibrosis) (often characterized, e.g., by beta-adrenergic receptor antibodies).

[0532] Additional disorders that may have an autoimmune component that may be treated, prevented, diagnosed and/or prognosed with the compositions of the invention include, but are not limited to, chronic active hepatitis (often characterized, e.g., by smooth muscle antibodies), primary biliary cirrhosis (often characterized, e.g., by mitochondria antibodies), other endocrine gland failure (often characterized, e.g., by specific tissue antibodies in some cases), vitiligo (often characterized, e.g., by melanocyte antibodies), vasculitis (often characterized, e.g., by Ig and complement in vessel walls and/or low serum complement), post-MI (often characterized, e.g., by myocardial antibodies), cardiotomy syndrome (often characterized, e.g., by myocardial antibodies), urticaria (often characterized, e.g., by IgG and IgM antibodies to IgE), atopic dermatitis (often characterized, e.g., by IgG and IgM antibodies to IgE), asthma (often characterized, e.g., by IgG and IgM antibodies to IgE), and many other inflammatory, granulomatous, degenerative, and atrophic disorders.

[0533] In a preferred embodiment, the autoimmune diseases and disorders and/or conditions associated with the diseases and disorders recited above are treated, prevented, diagnosed and/or prognosed using for example, antagonists or agonists, polypeptides or polynucleotides, or antibodies of the present invention. In a specific preferred embodiment, rheumatoid arthritis is treated, prevented, and/or diagnosed using polynucleotides, polypeptides, antibodies, and/or agonists or antagonists of the present invention.

[0534] In another specific preferred embodiment, systemic lupus erythematosus is treated, prevented, and/or diagnosed using polynucleotides, polypeptides, antibodies, and/or agonists or antagonists of the present invention. In another specific preferred embodiment, idiopathic thrombocytopenia purpura is treated, prevented, and/or diagnosed using polynucleotides, polypeptides, antibodies, and/or agonists or antagonists of the present invention.

[0535] In another specific preferred embodiment IgA nephropathy is treated, prevented, and/or diagnosed using polynucleotides, polypeptides, antibodies, and/or agonists or antagonists of the present invention.

[0536] In a preferred embodiment, the autoimmune diseases and disorders and/or conditions associated with the diseases and disorders recited above are treated, prevented, diagnosed and/or prognosed using polynucleotides, polypeptides, antibodies, and/or agonists or antagonists of the present invention

[0537] In preferred embodiments, polypeptides, antibodies, polynucleotides and/or agonists or antagonists of the present invention are used as a immunosuppressive agent(s).

[0538] Polynucleotides, polypeptides, antibodies, and/or agonists or antagonists of the present invention may be useful in treating, preventing, prognosing, and/or diagnosing diseases, disorders, and/or conditions of hematopoietic cells. Polynucleotides, polypeptides, antibodies, and/or agonists or antagonists of the present invention could be used to increase differentiation and proliferation of hematopoietic cells, including the pluripotent stem cells, in an effort to treat or prevent those diseases, disorders, and/or conditions associated with a decrease in certain (or many) types hematopoietic cells, including but not limited to, leukopenia, neutropenia, anemia, and thrombocytopenia. Alternatively, Polynucleotides, polypeptides, antibodies, and/or agonists or antagonists of the present invention could be used to increase differentiation and proliferation of hematopoietic cells, including the pluripotent stem cells, in an effort to treat or prevent those diseases, disorders, and/or conditions associated with an increase in certain (or many) types of hematopoietic cells, including but not limited to, histiocytosis.

[0539] Allergic reactions and conditions, such as asthma (particularly allergic asthma) or other respiratory problems, may also be treated, prevented, diagnosed and/or prognosed using polypeptides, antibodies, or polynucleotides of the invention, and/or agonists or antagonists thereof. Moreover, these molecules can be used to treat, prevent, prognose, and/or diagnose anaphylaxis, hypersensitivity to an antigenic molecule, or blood group incompatibility.

[0540] Additionally, polypeptides or polynucleotides of the invention, and/or agonists or antagonists thereof, may be used to treat, prevent, diagnose and/or prognose IgE-mediated allergic reactions. Such allergic reactions include, but are not limited to, asthma, rhinitis, and eczema. In specific embodiments, polynucleotides, polypeptides, antibodies, and/or agonists or antagonists of the present invention may be used to modulate IgE concentrations in vitro or in vivo.

[0541] Moreover, polynucleotides, polypeptides, antibodies, and/or agonists or antagonists of the present invention have uses in the diagnosis, prognosis, prevention, and/or treatment of inflammatory conditions. For example, since polypeptides, antibodies, or polynucleotides of the invention, and/or agonists or antagonists of the invention may inhibit the activation, proliferation and/or differentiation of cells involved in an inflammatory response, these molecules can be used to prevent and/or treat chronic and acute inflammatory conditions. Such inflammatory conditions include, but are not limited to, for example, inflammation associated with infection (e.g., septic shock, sepsis, or systemic inflammatory response syndrome), ischemia-reperfusion injury, endotoxin lethality, complement-mediated hyperacute rejection, nephritis, cytokine or chemokine induced lung injury, inflammatory bowel disease, Crohn's disease, over production of cytokines (e.g., TNF or IL-1.), respiratory disorders (e.g., asthma and allergy); gastrointestinal disorders (e.g., inflammatory bowel disease); cancers (e.g., gastric, ovarian, lung, bladder, liver, and breast); CNS disorders (e.g., multiple sclerosis; ischemic brain injury and/or stroke, traumatic brain injury, neurodegenerative disorders (e.g., Parkinson's disease and Alzheimer's disease); AIDS-related dementia; and prion disease); cardiovascular disorders (e.g., atherosclerosis, myocarditis, cardiovascular disease, and cardiopulmonary bypass complications); as well as many additional diseases, conditions, and disorders that are characterized by inflammation (e.g., hepatitis, rheumatoid arthritis, gout, trauma, pancreatitis, sarcoidosis, dermatitis, renal ischemia-reperfusion injury, Grave's disease, systemic lupus erythematosus, diabetes mellitus, and allogenic transplant rejection).

[0542] Because inflammation is a fundamental defense mechanism, inflammatory disorders can effect virtually any tissue of the body. Accordingly, polynucleotides, polypeptides, and antibodies of the invention, as well as agonists or antagonists thereof, have uses in the treatment of tissue-specific inflammatory disorders, including, but not limited to, adrenalitis, alveolitis, angiocholecystitis, appendicitis, balanitis, blepharitis, bronchitis, bursitis, carditis, cellulitis, cervicitis, cholecystitis, chorditis, cochlitis, colitis, conjunctivitis, cystitis, dermatitis, diverticulitis, encephalitis, endocarditis, esophagitis, eustachitis, fibrositis, folliculitis, gastritis, gastroenteritis, gingivitis, glossitis, hepatosplenitis, keratitis, labyrinthitis, laryngitis, lymphangitis, mastitis, media otitis, meningitis, metritis, mucitis, myocarditis, myosititis, myringitis, nephritis, neuritis, orchitis, osteochondritis, otitis, pericarditis, peritendonitis, peritonitis, pharyngitis, phlebitis, poliomyelitis, prostatitis, pulpitis, retinitis, rhinitis, salpingitis, scleritis, sclerochoroiditis, scrotitis, sinusitis, spondylitis, steatitis, stomatitis, synovitis, syringitis, tendonitis, tonsillitis, urethritis, and vaginitis.

[0543] In specific embodiments, polypeptides, antibodies, or polynucleotides of the invention, and/or agonists or antagonists thereof, are useful to diagnose, prognose, prevent, and/or treat organ transplant rejections and graft-versus-host disease. Organ rejection occurs by host immune cell destruction of the transplanted tissue through an immune response. Similarly, an immune response is also involved in GVHD, but, in this case, the foreign transplanted immune cells destroy the host tissues. Polypeptides, antibodies, or polynucleotides of the invention, and/or agonists or antagonists thereof, that inhibit an immune response, particularly the activation, proliferation, differentiation, or chemotaxis of T-cells, may be an effective therapy in preventing organ rejection or GVHD. In specific embodiments, polypeptides, antibodies, or polynucleotides of the invention, and/or agonists or antagonists thereof, that inhibit an immune response, particularly the activation, proliferation, differentiation, or chemotaxis of T-cells, may be an effective therapy in preventing experimental allergic and hyperacute xenograft rejection.

[0544] In other embodiments, polypeptides, antibodies, or polynucleotides of the invention, and/or agonists or antagonists thereof, are useful to diagnose, prognose, prevent, and/or treat immune complex diseases, including, but not limited to, serum sickness, post streptococcal glomerulonephritis, polyarteritis nodosa, and immune complex-induced vasculitis.

[0545] Polypeptides, antibodies, polynucleotides and/or agonists or antagonists of the invention can be used to treat, detect, and/or prevent infectious agents. For example, by increasing the immune response, particularly increasing the proliferation activation and/or differentiation of B and/or T cells, infectious diseases may be treated, detected, and/or prevented. The immune response may be increased by either enhancing an existing immune response, or by initiating a new immune response. Alternatively, polynucleotides, polypeptides, antibodies, and/or agonists or antagonists of the present invention may also directly inhibit the infectious agent (refer to section of application listing infectious agents, etc), without necessarily eliciting an immune response.

[0546] In another embodiment, polypeptides, antibodies, polynucleotides and/or agonists or antagonists of the present invention are used as a vaccine adjuvant that enhances immune responsiveness to an antigen. In a specific embodiment, polypeptides, antibodies, polynucleotides and/or agonists or antagonists of the present invention are used as an adjuvant to enhance tumor-specific immune responses.

[0547] In another specific embodiment, polypeptides, antibodies, polynucleotides and/or agonists or antagonists of the present invention are used as an adjuvant to enhance anti-viral immune responses. Anti-viral immune responses that may be enhanced using the compositions of the invention as an adjuvant, include virus and virus associated diseases or symptoms described herein or otherwise known in the art. In specific embodiments, the compositions of the invention are used as an adjuvant to enhance an immune response to a virus, disease, or symptom selected from the group consisting of: AIDS, meningitis, Dengue, EBV, and hepatitis (e.g., hepatitis B). In another specific embodiment, the compositions of the invention are used as an adjuvant to enhance an immune response to a virus, disease, or symptom selected from the group consisting of: HIV/AIDS, respiratory syncytial virus, Dengue, rotavirus, Japanese B encephalitis, influenza A and B, parainfluenza, measles, cytomegalovirus, rabies, Junin, Chikungunya, Rift Valley Fever, herpes simplex, and yellow fever.

[0548] In another specific embodiment, polypeptides, antibodies, polynucleotides and/or agonists or antagonists of the present invention are used as an adjuvant to enhance anti-bacterial or anti-fungal immune responses. Anti-bacterial or anti-fungal immune responses that may be enhanced using the compositions of the invention as an adjuvant, include bacteria or fungus and bacteria or fungus associated diseases or symptoms described herein or otherwise known in the art. In specific embodiments, the compositions of the invention are used as an adjuvant to enhance an immune response to a bacteria or fungus, disease, or symptom selected from the group consisting of: tetanus, Diphtheria, botulism, and meningitis type B.

[0549] In another specific embodiment, the compositions of the invention are used as an adjuvant to enhance an immune response to a bacteria or fungus, disease, or symptom selected from the group consisting of: Vibrio cholerae, Mycobacterium leprae, Salmonella typhi, Salmonella paratyphi, Meisseria meningitidis, Streptococcus pneumoniae, Group B streptococcus, Shigella spp., Enterotoxigenic Escherichia coli, Enterohemorrhagic E. coli, and Borrelia burgdorferi.

[0550] In another specific embodiment, polypeptides, antibodies, polynucleotides and/or agonists or antagonists of the present invention are used as an adjuvant to enhance anti-parasitic immune responses. Anti-parasitic immune responses that may be enhanced using the compositions of the invention as an adjuvant, include parasite and parasite associated diseases or symptoms described herein or otherwise known in the art. In specific embodiments, the compositions of the invention are used as an adjuvant to enhance an immune response to a parasite. In another specific embodiment, the compositions of the invention are used as an adjuvant to enhance an immune response to Plasmodium (malaria) or Leishmania.

[0551] In another specific embodiment, polypeptides, antibodies, polynucleotides and/or agonists or antagonists of the present invention may also be employed to treat infectious diseases including silicosis, sarcoidosis, and idiopathic pulmonary fibrosis; for example, by preventing the recruitment and activation of mononuclear phagocytes.

[0552] In another specific embodiment, polypeptides, antibodies, polynucleotides and/or agonists or antagonists of the present invention are used as an antigen for the generation of antibodies to inhibit or enhance immune mediated responses against polypeptides of the invention.

[0553] In one embodiment, polypeptides, antibodies, polynucleotides and/or agonists or antagonists of the present invention are administered to an animal (e.g., mouse, rat, rabbit, hamster, guinea pig, pigs, micro-pig, chicken, camel, goat, horse, cow, sheep, dog, cat, non-human primate, and human, most preferably human) to boost the immune system to produce increased quantities of one or more antibodies (e.g., IgG, IgA, IgM, and IgE), to induce higher affinity antibody production and immunoglobulin class switching (e.g., IgG, IgA, IgM, and IgE), and/or to increase an immune response.

[0554] In another specific embodiment, polypeptides, antibodies, polynucleotides and/or agonists or antagonists of the present invention are used as a stimulator of B cell responsiveness to pathogens.

[0555] In another specific embodiment, polypeptides, antibodies, polynucleotides and/or agonists or antagonists of the present invention are used as an activator of T cells.

[0556] In another specific embodiment, polypeptides, antibodies, polynucleotides and/or agonists or antagonists of the present invention are used as an agent that elevates the immune status of an individual prior to their receipt of immunosuppressive therapies.

[0557] In another specific embodiment, polypeptides, antibodies, polynucleotides and/or agonists or antagonists of the present invention are used as an agent to induce higher affinity antibodies.

[0558] In another specific embodiment, polypeptides, antibodies, polynucleotides and/or agonists or antagonists of the present invention are used as an agent to increase serum immunoglobulin concentrations.

[0559] In another specific embodiment, polypeptides, antibodies, polynucleotides and/or agonists or antagonists of the present invention are used as an agent to accelerate recovery of immunocompromised individuals.

[0560] In another specific embodiment, polypeptides, antibodies, polynucleotides and/or agonists or antagonists of the present invention are used as an agent to boost immunoresponsiveness among aged populations and/or neonates.

[0561] In another specific embodiment, polypeptides, antibodies, polynucleotides and/or agonists or antagonists of the present invention are used as an immune system enhancer prior to, during, or after bone marrow transplant and/or other transplants (e.g., allogeneic or xenogeneic organ transplantation). With respect to transplantation, compositions of the invention may be administered prior to, concomitant with, and/or after transplantation. In a specific embodiment, compositions of the invention are administered after transplantation, prior to the beginning of recovery of T-cell populations. In another specific embodiment, compositions of the invention are first administered after transplantation after the beginning of recovery of T cell populations, but prior to full recovery of B cell populations.

[0562] In another specific embodiment, polypeptides, antibodies, polynucleotides and/or agonists or antagonists of the present invention are used as an agent to boost immunoresponsiveness among individuals having an acquired loss of B cell function. Conditions resulting in an acquired loss of B cell function that may be ameliorated or treated by administering the polypeptides, antibodies, polynucleotides and/or agonists or antagonists thereof, include, but are not limited to, HIV Infection, AIDS, bone marrow transplant, and B cell chronic lymphocytic leukemia (CLL).

[0563] In another specific embodiment, polypeptides, antibodies, polynucleotides and/or agonists or antagonists of the present invention are used as an agent to boost immunoresponsiveness among individuals having a temporary immune deficiency. Conditions resulting in a temporary immune deficiency that may be ameliorated or treated by administering the polypeptides, antibodies, polynucleotides and/or agonists or antagonists thereof, include, but are not limited to, recovery from viral infections (e.g., influenza), conditions associated with malnutrition, recovery from infectious mononucleosis, or conditions associated with stress, recovery from measles, recovery from blood transfusion, and recovery from surgery.

[0564] In another specific embodiment, polypeptides, antibodies, polynucleotides and/or agonists or antagonists of the present invention are used as a regulator of antigen presentation by monocytes, dendritic cells, and/or B-cells. In one embodiment, polynucleotides, polypeptides, antibodies, and/or agonists or antagonists of the present invention enhance antigen presentation or antagonizes antigen presentation in vitro or in vivo. Moreover, in related embodiments, said enhancement or antagonism of antigen presentation may be useful as an anti-tumor treatment or to modulate the immune system.

[0565] In another specific embodiment, polypeptides, antibodies, polynucleotides and/or agonists or antagonists of the present invention are used as an agent to direct an individual's immune system towards development of a humoral response (i.e. TH2) as opposed to a TH1 cellular response.

[0566] In another specific embodiment, polypeptides, antibodies, polynucleotides and/or agonists or antagonists of the present invention are used as a means to induce tumor proliferation and thus make it more susceptible to anti-neoplastic agents. For example, multiple myeloma is a slowly dividing disease and is thus refractory to virtually all anti-neoplastic regimens. If these cells were forced to proliferate more rapidly their susceptibility profile would likely change.

[0567] In another specific embodiment, polypeptides, antibodies, polynucleotides and/or agonists or antagonists of the present invention are used as a stimulator of B cell production in pathologies such as AIDS, chronic lymphocyte disorder and/or Common Variable Immunodificiency.

[0568] In another specific embodiment, polypeptides, antibodies, polynucleotides and/or agonists or antagonists of the present invention are used as a therapy for generation and/or regeneration of lymphoid tissues following surgery, trauma or genetic defect. In another specific embodiment, polypeptides, antibodies, polynucleotides and/or agonists or antagonists of the present invention are used in the pretreatment of bone marrow samples prior to transplant.

[0569] In another specific embodiment, polypeptides, antibodies, polynucleotides and/or agonists or antagonists of the present invention are used as a gene-based therapy for genetically inherited disorders resulting in immuno-incompetence/immunodeficiency such as observed among SCID patients.

[0570] In another specific embodiment, polypeptides, antibodies, polynucleotides and/or agonists or antagonists of the present invention are used as a means of activating monocytes/macrophages to defend against parasitic diseases that effect monocytes such as Leishmania.

[0571] In another specific embodiment, polypeptides, antibodies, polynucleotides and/or agonists or antagonists of the present invention are used as a means of regulating secreted cytokines that are elicited by polypeptides of the invention.

[0572] In another embodiment, polypeptides, antibodies, polynucleotides and/or agonists or antagonists of the present invention are used in one or more of the applications decribed herein, as they may apply to veterinary medicine.

[0573] In another specific embodiment, polypeptides, antibodies, polynucleotides and/or agonists or antagonists of the present invention are used as a means of blocking various aspects of immune responses to foreign agents or self. Examples of diseases or conditions in which blocking of certain aspects of immune responses may be desired include autoimmune disorders such as lupus, and arthritis, as well as immunoresponsiveness to skin allergies, inflammation, bowel disease, injury and diseases/disorders associated with pathogens.

[0574] In another specific embodiment, polypeptides, antibodies, polynucleotides and/or agonists or antagonists of the present invention are used as a therapy for preventing the B cell proliferation and Ig secretion associated with autoimmune diseases such as idiopathic thrombocytopenic purpura, systemic lupus erythematosus and multiple sclerosis.

[0575] In another specific embodiment, polypeptides, antibodies, polynucleotides and/or agonists or antagonists of the present invention are used as a inhibitor of B and/or T cell migration in endothelial cells. This activity disrupts tissue architecture or cognate responses and is useful, for example in disrupting immune responses, and blocking sepsis.

[0576] In another specific embodiment, polypeptides, antibodies, polynucleotides and/or agonists or antagonists of the present invention are used as a therapy for chronic hypergammaglobulinemia evident in such diseases as monoclonal gammopathy of undetermined significance (MGUS), Waldenstrom's disease, related idiopathic monoclonal gammopathies, and plasmacytomas.

[0577] In another specific embodiment, polypeptides, antibodies, polynucleotides and/or agonists or antagonists of the present invention may be employed for instance to inhibit polypeptide chemotaxis and activation of macrophages and their precursors, and of neutrophils, basophils, B lymphocytes and some T-cell subsets, e.g., activated and CD8 cytotoxic T cells and natural killer cells, in certain autoimmune and chronic inflammatory and infective diseases. Examples of autoimmune diseases are described herein and include multiple sclerosis, and insulin-dependent diabetes.

[0578] The polypeptides, antibodies, polynucleotides and/or agonists or antagonists of the present invention may also be employed to treat idiopathic hyper-eosinophilic syndrome by, for example, preventing eosinophil production and migration.

[0579] In another specific embodiment, polypeptides, antibodies, polynucleotides and/or agonists or antagonists of the present invention are used to enhance or inhibit complement mediated cell lysis.

[0580] In another specific embodiment, polypeptides, antibodies, polynucleotides and/or agonists or antagonists of the present invention are used to enhance or inhibit antibody dependent cellular cytotoxicity.

[0581] In another specific embodiment, polypeptides, antibodies, polynucleotides and/or agonists or antagonists of the present invention may also be employed for treating atherosclerosis, for example, by preventing monocyte infiltration in the artery wall.

[0582] In another specific embodiment, polypeptides, antibodies, polynucleotides and/or agonists or antagonists of the present invention may be employed to treat adult respiratory distress syndrome (ARDS).

[0583] In another specific embodiment, polypeptides, antibodies, polynucleotides and/or agonists or antagonists of the present invention may be useful for stimulating wound and tissue repair, stimulating angiogenesis, and/or stimulating the repair of vascular or lymphatic diseases or disorders. Additionally, agonists and antagonists of the invention may be used to stimulate the regeneration of mucosal surfaces.

[0584] In a specific embodiment, polynucleotides or polypeptides, and/or agonists thereof are used to diagnose, prognose, treat, and/or prevent a disorder characterized by primary or acquired immunodeficiency, deficient serum immunoglobulin production, recurrent infections, and/or immune system dysfunction. Moreover, polynucleotides or polypeptides, and/or agonists thereof may be used to treat or prevent infections of the joints, bones, skin, and/or parotid glands, blood-borne infections (e.g., sepsis, meningitis, septic arthritis, and/or osteomyelitis), autoimmune diseases (e.g., those disclosed herein), inflammatory disorders, and malignancies, and/or any disease or disorder or condition associated with these infections, diseases, disorders and/or malignancies) including, but not limited to, CVID, other primary immune deficiencies, HIV disease, CLL, recurrent bronchitis, sinusitis, otitis media, conjunctivitis, pneumonia, hepatitis, meningitis, herpes zoster (e.g., severe herpes zoster), and/or pneumocystis carnii. Other diseases and disorders that may be prevented, diagnosed, prognosed, and/or treated with polynucleotides or polypeptides, and/or agonists of the present invention include, but are not limited to, HIV infection, HTLV-BLV infection, lymphopenia, phagocyte bactericidal dysfunction anemia, thrombocytopenia, and hemoglobinuria.

[0585] In another embodiment, polynucleotides, polypeptides, antibodies, and/or agonists or antagonists of the present invention are used to treat, and/or diagnose an individual having common variable immunodeficiency disease (“CVID”; also known as “acquired agammaglobulinemia” and “acquired hypogammaglobulinemia”) or a subset of this disease.

[0586] In a specific embodiment, polynucleotides, polypeptides, antibodies, and/or agonists or antagonists of the present invention may be used to diagnose, prognose, prevent, and/or treat cancers or neoplasms including immune cell or immune tissue-related cancers or neoplasms. Examples of cancers or neoplasms that may be prevented, diagnosed, or treated by polynucleotides, polypeptides, antibodies, and/or agonists or antagonists of the present invention include, but are not limited to, acute myelogenous leukemia, chronic myelogenous leukemia, Hodgkin's disease, non-Hodgkin's lymphoma, acute lymphocytic anemia (ALL) Chronic lymphocyte leukemia, plasmacytomas, multiple myeloma, Burkitt's lymphoma, EBV-transformed diseases, and/or diseases and disorders described in the section entitled “Hyperproliferative Disorders” elsewhere herein.

[0587] In another specific embodiment, polypeptides, antibodies, polynucleotides and/or agonists or antagonists of the present invention are used as a therapy for decreasing cellular proliferation of Large B-cell Lymphomas.

[0588] In another specific embodiment, polypeptides, antibodies, polynucleotides and/or agonists or antagonists of the present invention are used as a means of decreasing the involvement of B cells and Ig associated with Chronic Myelogenous Leukemia.

[0589] In specific embodiments, the compositions of the invention are used as an agent to boost immunoresponsiveness among B cell immunodeficient individuals, such as, for example, an individual who has undergone a partial or complete splenectomy.

[0590] Antagonists of the invention include, for example, binding and/or inhibitory antibodies, antisense nucleic acids, ribozymes or soluble forms of the polypeptides of the present invention (e.g., Fc fusion protein; see, e.g., Example 9). Agonists of the invention include, for example, binding or stimulatory antibodies, and soluble forms of the polypeptides (e.g., Fc fusion proteins; see, e.g., Example 9). polypeptides, antibodies, polynucleotides and/or agonists or antagonists of the present invention may be employed in a composition with a pharmaceutically acceptable carrier, e.g., as described herein.

[0591] In another embodiment, polypeptides, antibodies, polynucleotides and/or agonists or antagonists of the present invention are administered to an animal (including, but not limited to, those listed above, and also including transgenic animals) incapable of producing functional endogenous antibody molecules or having an otherwise compromised endogenous immune system, but which is capable of producing human immunoglobulin molecules by means of a reconstituted or partially reconstituted immune system from another animal (see, e.g., published PCT Application Nos. WO98/24893, WO/9634096, WO/9633735, and WO/9110741). Administration of polypeptides, antibodies, polynucleotides and/or agonists or antagonists of the present invention to such animals is useful for the generation of monoclonal antibodies against the polypeptides, antibodies, polynucleotides and/or agonists or antagonists of the present invention.

[0592] Blood-related Disorders

[0593] The polynucleotides, polypeptides, antibodies, and/or agonists or antagonists of the present invention may be used to modulate hemostatic (the stopping of bleeding) or thrombolytic (clot dissolving) activity. For example, by increasing hemostatic or thrombolytic activity, polynucleotides or polypeptides, and/or agonists or antagonists of the present invention could be used to treat or prevent blood coagulation diseases, disorders, and/or conditions (e.g., afibrinogenemia, factor deficiencies, hemophilia), blood platelet diseases, disorders, and/or conditions (e.g., thrombocytopenia), or wounds resulting from trauma, surgery, or other causes. Alternatively, polynucleotides, polypeptides, antibodies, and/or agonists or antagonists of the present invention that can decrease hemostatic or thrombolytic activity could be used to inhibit or dissolve clotting. These molecules could be important in the treatment or prevention of heart attacks (infarction), strokes, or scarring.

[0594] In specific embodiments, the polynucleotides, polypeptides, antibodies, and/or agonists or antagonists of the present invention may be used to prevent, diagnose, prognose, and/or treat thrombosis, arterial thrombosis, venous thrombosis, thromboembolism, pulmonary embolism, atherosclerosis, myocardial infarction, transient ischemic attack, unstable angina. In specific embodiments, the polynucleotides, polypeptides, antibodies, and/or agonists or antagonists of the present invention may be used for the prevention of occulsion of saphenous grafts, for reducing the risk of periprocedural thrombosis as might accompany angioplasty procedures, for reducing the risk of stroke in patients with atrial fibrillation including nonrheumatic atrial fibrillation, for reducing the risk of embolism associated with mechanical heart valves and or mitral valves disease. Other uses for the polynucleotides, polypeptides, antibodies, and/or agonists or antagonists of the present invention, include, but are not limited to, the prevention of occlusions in extrcorporeal devices (e.g., intravascular canulas, vascular access shunts in hemodialysis patients, hemodialysis machines, and cardiopulmonary bypass machines).

[0595] In another embodiment, a polypeptide of the invention, or polynucleotides, antibodies, agonists, or antagonists corresponding to that polypeptide, may be used to prevent, diagnose, prognose, and/or treat diseases and disorders of the blood and/or blood forming organs associated with the tissue(s) in which the polypeptide of the invention is expressed, including one, two, three, four, five, or more tissues disclosed in Table 1A, column 8 (Tissue Distribution Library Code).

[0596] The polynucleotides, polypeptides, antibodies, and/or agonists or antagonists of the present invention may be used to modulate hematopoietic activity (the formation of blood cells). For example, the polynucleotides, polypeptides, antibodies, and/or agonists or antagonists of the present invention may be used to increase the quantity of all or subsets of blood cells, such as, for example, erythrocytes, lymphocytes (B or T cells), myeloid cells (e.g., basophils, eosinophils, neutrophils, mast cells, macrophages) and platelets. The ability to decrease the quantity of blood cells or subsets of blood cells may be useful in the prevention, detection, diagnosis and/or treatment of anemias and leukopenias described below. Alternatively, the polynucleotides, polypeptides, antibodies, and/or agonists or antagonists of the present invention may be used to decrease the quantity of all or subsets of blood cells, such as, for example, erythrocytes, lymphocytes (B or T cells), myeloid cells (e.g., basophils, eosinophils, neutrophils, mast cells, macrophages) and platelets. The ability to decrease the quantity of blood cells or subsets of blood cells may be useful in the prevention, detection, diagnosis and/or treatment of leukocytoses, such as, for example eosinophilia.

[0597] The polynucleotides, polypeptides, antibodies, and/or agonists or antagonists of the present invention may be used to prevent, treat, or diagnose blood dyscrasia.

[0598] Anemias are conditions in which the number of red blood cells or amount of hemoglobin (the protein that carries oxygen) in them is below normal. Anemia may be caused by excessive bleeding, decreased red blood cell production, or increased red blood cell destruction (hemolysis). The polynucleotides, polypeptides, antibodies, and/or agonists or antagonists of the present invention may be useful in treating, preventing, and/or diagnosing anemias. Anemias that may be treated prevented or diagnosed by the polynucleotides, polypeptides, antibodies, and/or agonists or antagonists of the present invention include iron deficiency anemia, hypochromic anemia, microcytic anemia, chlorosis, hereditary siderob;astic anemia, idiopathic acquired sideroblastic anemia, red cell aplasia, megaloblastic anemia (e.g., pernicious anemia, (vitamin B12 deficiency) and folic acid deficiency anemia), aplastic anemia, hemolytic anemias (e.g., autoimmune helolytic anemia, microangiopathic hemolytic anemia, and paroxysmal nocturnal hemoglobinuria). The polynucleotides, polypeptides, antibodies, and/or agonists or antagonists of the present invention may be useful in treating, preventing, and/or diagnosing anemias associated with diseases including but not limited to, anemias associated with systemic lupus erythematosus, cancers, lymphomas, chronic renal disease, and enlarged spleens. The polynucleotides, polypeptides, antibodies, and/or agonists or antagonists of the present invention may be useful in treating, preventing, and/or diagnosing anemias arising from drug treatments such as anemias associated with methyldopa, dapsone, and/or sulfadrugs. Additionally, rhe polynucleotides, polypeptides, antibodies, and/or agonists or antagonists of the present invention may be useful in treating, preventing, and/or diagnosing anemias associated with abnormal red blood cell architecture including but not limited to, hereditary spherocytosis, hereditary elliptocytosis, glucose-6-phosphate dehydrogenase deficiency, and sickle cell anemia.

[0599] The polynucleotides, polypeptides, antibodies, and/or agonists or antagonists of the present invention may be useful in treating, preventing, and/or diagnosing hemoglobin abnormalities, (e.g., those associated with sickle cell anemia, hemoglobin C disease, hemoglobin S-C disease, and hemoglobin E disease). Additionally, the polynucleotides, polypeptides, antibodies, and/or agonists or antagonists of the present invention may be useful in diagnosing, prognosing, preventing, and/or treating thalassemias, including, but not limited to major and minor forms of alpha-thalassemia and beta-thalassemia.

[0600] In another embodiment, the polynucleotides, polypeptides, antibodies, and/or agonists or antagonists of the present invention may be useful in diagnosing, prognosing, preventing, and/or treating bleeding disorders including, but not limited to, thrombocytopenia (e.g., idiopathic thrombocytopenic purpura, and thrombotic thrombocytopenic purpura), Von Willebrand's disease, hereditary platelet disorders (e.g., storage pool disease such as Chediak-Higashi and Hermansky-Pudlak syndromes, thromboxane A2 dysfunction, thromboasthenia, and Bernard-Soulier syndrome), hemolytic-uremic syndrome, hemophelias such as hemophelia A or Factor VII deficiency and Christmas disease or Factor IX deficiency, Hereditary Hemorhhagic Telangiectsia, also known as Rendu-Osler-Weber syndrome, allergic purpura (Henoch Schonlein purpura) and disseminated intravascular coagulation.

[0601] The effect of the polynucleotides, polypeptides, antibodies, and/or agonists or antagonists of the present invention on the clotting time of blood may be monitored using any of the clotting tests known in the art including, but not limited to, whole blood partial thromboplastin time (PTT), the activated partial thromboplastin time (aPTT), the activated clotting time (ACT), the recalcified activated clotting time, or the Lee-White Clotting time.

[0602] Several diseases and a variety of drugs can cause platelet dysfunction. Thus, in a specific embodiment, the polynucleotides, polypeptides, antibodies, and/or agonists or antagonists of the present invention may be useful in diagnosing, prognosing, preventing, and/or treating acquired platelet dysfunction such as platelet dysfunction accompanying kidney failure, leukemia, multiple myeloma, cirrhosis of the liver, and systemic lupus erythematosus as well as platelet dysfunction associated with drug treatments, including treatment with aspirin, ticlopidine, nonsteroidal anti-inflammatory drugs (used for arthritis, pain, and sprains), and penicillin in high doses.

[0603] In another embodiment, the polynucleotides, polypeptides, antibodies, and/or agonists or antagonists of the present invention may be useful in diagnosing, prognosing, preventing, and/or treating diseases and disorders characterized by or associated with increased or decreased numbers of white blood cells. Leukopenia occurs when the number of white blood cells decreases below normal. Leukopenias include, but are not limited to, neutropenia and lymphocytopenia. An increase in the number of white blood cells compared to normal is known as leukocytosis. The body generates increased numbers of white blood cells during infection. Thus, leukocytosis may simply be a normal physiological parameter that reflects infection. Alternatively, leukocytosis may be an indicator of injury or other disease such as cancer. Leokocytoses, include but are not limited to, eosinophilia, and accumulations of macrophages. In specific embodiments, the polynucleotides, polypeptides, antibodies, and/or agonists or antagonists of the present invention may be useful in diagnosing, prognosing, preventing, and/or treating leukopenia. In other specific embodiments, the polynucleotides, polypeptides, antibodies, and/or agonists or antagonists of the present invention may be useful in diagnosing, prognosing, preventing, and/or treating leukocytosis.

[0604] Leukopenia may be a generalized decreased in all types of white blood cells, or may be a specific depletion of particular types of white blood cells. Thus, in specific embodiments, the polynucleotides, polypeptides, antibodies, and/or agonists or antagonists of the present invention may be useful in diagnosing, prognosing, preventing, and/or treating decreases in neutrophil numbers, known as neutropenia. Neutropenias that may be diagnosed, prognosed, prevented, and/or treated by the polynucleotides, polypeptides, antibodies, and/or agonists or antagonists of the present invention include, but are not limited to, infantile genetic agranulocytosis, familial neutropenia, cyclic neutropenia, neutropenias resulting from or associated with dietary deficiencies (e.g., vitamin B 12 deficiency or folic acid deficiency), neutropenias resulting from or associated with drug treatments (e.g., antibiotic regimens such as penicillin treatment, sulfonamide treatment, anticoagulant treatment, anticonvulsant drugs, anti-thyroid drugs, and cancer chemotherapy), and neutropenias resulting from increased neutrophil destruction that may occur in association with some bacterial or viral infections, allergic disorders, autoimmune diseases, conditions in which an individual has an enlarged spleen (e.g., Felty syndrome, malaria and sarcoidosis), and some drug treatment regimens.

[0605] The polynucleotides, polypeptides, antibodies, and/or agonists or antagonists of the present invention may be useful in diagnosing, prognosing, preventing, and/or treating lymphocytopenias (decreased numbers of B and/or T lymphocytes), including, but not limited lymphocytopenias resulting from or associated with stress, drug treatments (e.g., drug treatment with corticosteroids, cancer chemotherapies, and/or radiation therapies), AIDS infection and/or other diseases such as, for example, cancer, rheumatoid arthritis, systemic lupus erythematosus, chronic infections, some viral infections and/or hereditary disorders (e.g., DiGeorge syndrome, Wiskott-Aldrich Syndome, severe combined immunodeficiency, ataxia telangiectsia).

[0606] The polynucleotides, polypeptides, antibodies, and/or agonists or antagonists of the present invention may be useful in diagnosing, prognosing, preventing, and/or treating diseases and disorders associated with macrophage numbers and/or macrophage function including, but not limited to, Gaucher's disease, Niemann-Pick disease, Letterer-Siwe disease and Hand-Schuller-Christian disease.

[0607] In another embodiment, the polynucleotides, polypeptides, antibodies, and/or agonists or antagonists of the present invention may be useful in diagnosing, prognosing, preventing, and/or treating diseases and disorders associated with eosinophil numbers and/or eosinophil function including, but not limited to, idiopathic hypereosinophilic syndrome, eosinophilia-myalgia syndrome, and Hand-Schuller-Christian disease.

[0608] In yet another embodiment, the polynucleotides, polypeptides, antibodies, and/or agonists or antagonists of the present invention may be useful in diagnosing, prognosing, preventing, and/or treating leukemias and lymphomas including, but not limited to, acute lymphocytic (lymphpblastic) leukemia (ALL), acute myeloid (myelocytic, myelogenous, myeloblastic, or myelomonocytic) leukemia, chronic lymphocytic leukemia (e.g., B cell leukemias, T cell leukemias, Sezary syndrome, and Hairy cell leukenia), chronic myelocytic (myeloid, myelogenous, or granulocytic) leukemia, Hodgkin's lymphoma, non-hodgkin's lymphoma, Burkitt's lymphoma, and mycosis fungoides.

[0609] In other embodiments, the polynucleotides, polypeptides, antibodies, and/or agonists or antagonists of the present invention may be useful in diagnosing, prognosing, preventing, and/or treating diseases and disorders of plasma cells including, but not limited to, plasma cell dyscrasias, monoclonal gammaopathies, monoclonal gammopathies of undetermined significance, multiple myeloma, macroglobulinemia, Waldenstrom's macroglobulinemia, cryoglobulinemia, and Raynaud's phenomenon.

[0610] In other embodiments, the polynucleotides, polypeptides, antibodies, and/or agonists or antagonists of the present invention may be useful in treating, preventing, and/or diagnosing myeloproliferative disorders, including but not limited to, polycythemia vera, relative polycythemia, secondary polycythemia, myelofibrosis, acute myelofibrosis, agnogenic myelod metaplasia, thrombocythemia, (including both primary and seconday thrombocythemia) and chronic myelocytic leukemia.

[0611] In other embodiments, the polynucleotides, polypeptides, antibodies, and/or agonists or antagonists of the present invention may be useful as a treatment prior to surgery, to increase blood cell production.

[0612] In other embodiments, the polynucleotides, polypeptides, antibodies, and/or agonists or antagonists of the present invention may be useful as an agent to enhance the migration, phagocytosis, superoxide production, antibody dependent cellular cytotoxicity of neutrophils, eosionophils and macrophages.

[0613] In other embodiments, the polynucleotides, polypeptides, antibodies, and/or agonists or antagonists of the present invention may be useful as an agent to increase the number of stem cells in circulation prior to stem cells pheresis. In another specific embodiment, the polynucleotides, polypeptides, antibodies, and/or agonists or antagonists of the present invention may be useful as an agent to increase the number of stem cells in circulation prior to platelet pheresis.

[0614] In other embodiments, the polynucleotides, polypeptides, antibodies, and/or agonists or antagonists of the present invention may be useful as an agent to increase cytokine production.

[0615] In other embodiments, the polynucleotides, polypeptides, antibodies, and/or agonists or antagonists of the present invention may be useful in preventing, diagnosing, and/or treating primary hematopoietic disorders.

[0616] Hyperproliferative Disorders

[0617] In certain embodiments, polynucleotides or polypeptides, or agonists or antagonists of the present invention can be used to treat or detect hyperproliferative disorders, including neoplasms. Polynucleotides or polypeptides, or agonists or antagonists of the present invention may inhibit the proliferation of the disorder through direct or indirect interactions. Alternatively, Polynucleotides or polypeptides, or agonists or antagonists of the present invention may proliferate other cells which can inhibit the hyperproliferative disorder.

[0618] For example, by increasing an immune response, particularly increasing antigenic qualities of the hyperproliferative disorder or by proliferating, differentiating, or mobilizing T-cells, hyperproliferative disorders can be treated. This immune response may be increased by either enhancing an existing immune response, or by initiating a new immune response. Alternatively, decreasing an immune response may also be a method of treating hyperproliferative disorders, such as a chemotherapeutic agent.

[0619] Examples of hyperproliferative disorders that can be treated or detected by polynucleotides or polypeptides, or agonists or antagonists of the present invention include, but are not limited to neoplasms located in the: colon, abdomen, bone, breast, digestive system, liver, pancreas, peritoneum, endocrine glands (adrenal, parathyroid, pituitary, testicles, ovary, thymus, thyroid), eye, head and neck, nervous (central and peripheral), lymphatic system, pelvis, skin, soft tissue, spleen, thorax, and urogenital tract.

[0620] Similarly, other hyperproliferative disorders can also be treated or detected by polynucleotides or polypeptides, or agonists or antagonists of the present invention. Examples of such hyperproliferative disorders include, but are not limited to: Acute Childhood Lymphoblastic Leukemia, Acute Lymphoblastic Leukemia, Acute Lymphocytic Leukemia, Acute Myeloid Leukemia, Adrenocortical Carcinoma, Adult (Primary) Hepatocellular Cancer, Adult (Primary) Liver Cancer, Adult Acute Lymphocytic Leukemia, Adult Acute Myeloid Leukemia, Adult Hodgkin's Disease, Adult Hodgkin's Lymphoma, Adult Lymphocytic Leukemia, Adult Non-Hodgkin's Lymphoma, Adult Primary Liver Cancer, Adult Soft Tissue Sarcoma, AIDS-Related Lymphoma, AIDS-Related Malignancies, Anal Cancer, Astrocytoma, Bile Duct Cancer, Bladder Cancer, Bone Cancer, Brain Stem Glioma, Brain Tumors, Breast Cancer, Cancer of the Renal Pelvis and Ureter, Central Nervous System (Primary) Lymphoma, Central Nervous System Lymphoma, Cerebellar Astrocytoma, Cerebral Astrocytoma, Cervical Cancer, Childhood (Primary) Hepatocellular Cancer, Childhood (Primary) Liver Cancer, Childhood Acute Lymphoblastic Leukemia, Childhood Acute Myeloid Leukemia, Childhood Brain Stem Glioma, Childhood Cerebellar Astrocytoma, Childhood Cerebral Astrocytoma, Childhood Extracranial Germ Cell Tumors, Childhood Hodgkin's Disease, Childhood Hodgkin's Lymphoma, Childhood Hypothalamic and Visual Pathway Glioma, Childhood Lymphoblastic Leukemia, Childhood Medulloblastoma, Childhood Non-Hodgkin's Lymphoma, Childhood Pineal and Supratentorial Primitive Neuroectodermal Tumors, Childhood Primary Liver Cancer, Childhood Rhabdomyosarcoma, Childhood Soft Tissue Sarcoma, Childhood Visual Pathway and Hypothalamic Glioma, Chronic Lymphocytic Leukemia, Chronic Myelogenous Leukemia, Colon Cancer, Cutaneous T-Cell Lymphoma, Endocrine Pancreas Islet Cell Carcinoma, Endometrial Cancer, Ependymoma, Epithelial Cancer, Esophageal Cancer, Ewing's Sarcoma and Related Tumors, Exocrine Pancreatic Cancer, Extracranial Germ Cell Tumor, Extragonadal Germ Cell Tumor, Extrahepatic Bile Duct Cancer, Eye Cancer, Female Breast Cancer, Gaucher's Disease, Gallbladder Cancer, Gastric Cancer, Gastrointestinal Carcinoid Tumor, Gastrointestinal Tumors, Germ Cell Tumors, Gestational Trophoblastic Tumor, Hairy Cell Leukemia, Head and Neck Cancer, Hepatocellular Cancer, Hodgkin's Disease, Hodgkin's Lymphoma, Hypergammaglobulinemia, Hypopharyngeal Cancer, Intestinal Cancers, Intraocular Melanoma, Islet Cell Carcinoma, Islet Cell Pancreatic Cancer, Kaposi's Sarcoma, Kidney Cancer, Laryngeal Cancer, Lip and Oral Cavity Cancer, Liver Cancer, Lung Cancer, Lymphoproliferative Disorders, Macroglobulinemia, Male Breast Cancer, Malignant Mesothelioma, Malignant Thymoma, Medulloblastoma, Melanoma, Mesothelioma, Metastatic Occult Primary Squamous Neck Cancer, Metastatic Primary Squamous Neck Cancer, Metastatic Squamous Neck Cancer, Multiple Myeloma, Multiple Myeloma/Plasma Cell Neoplasm, Myelodysplastic Syndrome, Myelogenous Leukemia, Myeloid Leukemia, Myeloproliferative Disorders, Nasal Cavity and Paranasal Sinus Cancer, Nasopharyngeal Cancer, Neuroblastoma, Non-Hodgkin's Lymphoma During Pregnancy, Nonmelanoma Skin Cancer, Non-Small Cell Lung Cancer, Occult Primary Metastatic Squamous Neck Cancer, Oropharyngeal Cancer, Osteo-/Malignant Fibrous Sarcoma, Osteosarcoma/Malignant Fibrous Histiocytoma, Osteosarcoma/Malignant Fibrous Histiocytoma of Bone, Ovarian Epithelial Cancer, Ovarian Germ Cell Tumor, Ovarian Low Malignant Potential Tumor, Pancreatic Cancer, Paraproteinemias, Purpura, Parathyroid Cancer, Penile Cancer, Pheochromocytoma, Pituitary Tumor, Plasma Cell Neoplasm/Multiple Myeloma, Primary Central Nervous System Lymphoma, Primary Liver Cancer, Prostate Cancer, Rectal Cancer, Renal Cell Cancer, Renal Pelvis and Ureter Cancer, Retinoblastoma, Rhabdomyosarcoma, Salivary Gland Cancer, Sarcoidosis Sarcomas, Sezary Syndrome, Skin Cancer, Small Cell Lung Cancer, Small Intestine Cancer, Soft Tissue Sarcoma, Squamous Neck Cancer, Stomach Cancer, Supratentorial Primitive Neuroectodermal and Pineal Tumors, T-Cell Lymphoma, Testicular Cancer, Thymoma, Thyroid Cancer, Transitional Cell Cancer of the Renal Pelvis and Ureter, Transitional Renal Pelvis and Ureter Cancer, Trophoblastic Tumors, Ureter and Renal Pelvis Cell Cancer, Urethral Cancer, Uterine Cancer, Uterine Sarcoma, Vaginal Cancer, Visual Pathway and Hypothalamic Glioma, Vulvar Cancer, Waldenstrom's Macroglobulinemia, Wilms' Tumor, and any other hyperproliferative disease, besides neoplasia, located in an organ system listed above.

[0621] In another preferred embodiment, polynucleotides or polypeptides, or agonists or antagonists of the present invention are used to diagnose, prognose, prevent, and/or treat premalignant conditions and to prevent progression to a neoplastic or malignant state, including but not limited to those disorders described above. Such uses are indicated in conditions known or suspected of preceding progression to neoplasia or cancer, in particular, where non-neoplastic cell growth consisting of hyperplasia, metaplasia, or most particularly, dysplasia has occurred (for review of such abnormal growth conditions, see Robbins and Angell, 1976, Basic Pathology, 2d Ed., W. B. Saunders Co., Philadelphia, pp. 68-79.)

[0622] Hyperplasia is a form of controlled cell proliferation, involving an increase in cell. number in a tissue or organ, without significant alteration in structure or function. Hyperplastic disorders which can be diagnosed, prognosed, prevented, and/or treated with compositions of the invention (including polynucleotides, polypeptides, agonists or antagonists) include, but are not limited to, angiofollicular mediastinal lymph node hyperplasia, angiolymphoid hyperplasia with eosinophilia, atypical melanocytic hyperplasia, basal cell hyperplasia, benign giant lymph node hyperplasia, cementum hyperplasia, congenital adrenal hyperplasia, congenital sebaceous hyperplasia, cystic hyperplasia, cystic hyperplasia of the breast, denture hyperplasia, ductal hyperplasia, endometrial hyperplasia, fibromuscular hyperplasia, focal epithelial hyperplasia, gingival hyperplasia, inflammatory fibrous hyperplasia, inflammatory papillary hyperplasia, intravascular papillary endothelial hyperplasia, nodular hyperplasia of prostate, nodular regenerative hyperplasia, pseudoepitheliomatous hyperplasia, senile sebaceous hyperplasia, and verrucous hyperplasia.

[0623] Metaplasia is a form of controlled cell growth in which one type of adult or fully differentiated cell substitutes for another type of adult cell. Metaplastic disorders which can be diagnosed, prognosed, prevented, and/or treated with compositions of the invention (including polynucleotides, polypeptides, agonists or antagonists) include, but are not limited to, agnogenic myeloid metaplasia, apocrine metaplasia, atypical metaplasia, autoparenchymatous metaplasia, connective tissue metaplasia, epithelial metaplasia, intestinal metaplasia, metaplastic anemia, metaplastic ossification, metaplastic polyps, myeloid metaplasia, primary myeloid metaplasia, secondary myeloid metaplasia, squamous metaplasia, squamous metaplasia of amnion, and symptomatic myeloid metaplasia.

[0624] Dysplasia is frequently a forerunner of cancer, and is found mainly in the epithelia; it is the most disorderly form of non-neoplastic cell growth, involving a loss in individual cell uniformity and in the architectural orientation of cells. Dysplastic cells often have abnormally large, deeply stained nuclei, and exhibit pleomorphism. Dysplasia characteristically occurs where there exists chronic irritation or inflammation. Dysplastic disorders which can be diagnosed, prognosed, prevented, and/or treated with compositions of the invention (including polynucleotides, polypeptides, agonists or antagonists) include, but are not limited to, anhidrotic ectodermal dysplasia, anterofacial dysplasia, asphyxiating thoracic dysplasia, atriodigital dysplasia, bronchopulmonary dysplasia, cerebral dysplasia, cervical dysplasia, chondroectodermal dysplasia, cleidocranial dysplasia, congenital ectodermal dysplasia, craniodiaphysial dysplasia, craniocarpotarsal dysplasia, craniometaphysial dysplasia, dentin dysplasia, diaphysial dysplasia, ectodermal dysplasia, enamel dysplasia, encephalo-ophthalmic dysplasia, dysplasia epiphysialis hemimelia, dysplasia epiphysialis multiplex, dysplasia epiphysialis punctata, epithelial dysplasia, faciodigitogenital dysplasia, familial fibrous dysplasia of jaws, familial white folded dysplasia, fibromuscular dysplasia, fibrous dysplasia of bone, florid osseous dysplasia, hereditary renal-retinal dysplasia, hidrotic ectodermal dysplasia, hypohidrotic ectodermal dysplasia, lymphopenic thymic dysplasia, mammary dysplasia, mandibulofacial dysplasia, metaphysial dysplasia, Mondini dysplasia, monostotic fibrous dysplasia, mucoepithelial dysplasia, multiple epiphysial dysplasia, oculoauriculovertebral dysplasia, oculodentodigital dysplasia, oculovertebral dysplasia, odontogenic dysplasia, ophthalmomandibulomelic dysplasia, periapical cemental dysplasia, polyostotic fibrous dysplasia, pseudoachondroplastic spondyloepiphysial dysplasia, retinal dysplasia, septo-optic dysplasia, spondyloepiphysial dysplasia, and ventriculoradial dysplasia.

[0625] Additional pre-neoplastic disorders which can be diagnosed, prognosed, prevented, and/or treated with compositions of the invention (including polynucleotides, polypeptides, agonists or antagonists) include, but are not limited to, benign dysproliferative disorders (e.g., benign tumors, fibrocystic conditions, tissue hypertrophy, intestinal polyps, colon polyps, and esophageal dysplasia), leukoplakia, keratoses, Bowen's disease, Farmer's Skin, solar cheilitis, and solar keratosis.

[0626] In another embodiment, a polypeptide of the invention, or polynucleotides, antibodies, agonists, or antagonists corresponding to that polypeptide, may be used to diagnose and/or prognose disorders associated with the tissue(s) in which the polypeptide of the invention is expressed, including one, two, three, four, five, or more tissues disclosed in Table 1A, column 8 (Tissue Distribution Library Code).

[0627] In another embodiment, polynucleotides, polypeptides, antibodies, and/or agonists or antagonists of the present invention conjugated to a toxin or a radioactive isotope, as described herein, may be used to treat cancers and neoplasms, including, but not limited to those described herein. In a further preferred embodiment, polynucleotides, polypeptides, antibodies, and/or agonists or antagonists of the present invention conjugated to a toxin or a radioactive isotope, as described herein, may be used to treat acute myelogenous leukemia.

[0628] Additionally, polynucleotides, polypeptides, and/or agonists or antagonists of the invention may affect apoptosis, and therefore, would be useful in treating a number of diseases associated with increased cell survival or the inhibition of apoptosis. For example, diseases associated with increased cell survival or the inhibition of apoptosis that could be diagnosed, prognosed, prevented, and/or treated by polynucleotides, polypeptides, and/or agonists or antagonists of the invention, include cancers (such as follicular lymphomas, carcinomas with p53 mutations, and hormone-dependent tumors, including, but not limited to colon cancer, cardiac tumors, pancreatic cancer, melanoma, retinoblastoma, glioblastoma, lung cancer, intestinal cancer, testicular cancer, stomach cancer, neuroblastoma, myxoma, myoma, lymphoma, endothelioma, osteoblastoma, osteoclastoma, osteosarcoma, chondrosarcoma, adenoma, breast cancer, prostate cancer, Kaposi's sarcoma and ovarian cancer); autoimmune disorders such as, multiple sclerosis, Sjogren's syndrome, Hashimoto's thyroiditis, biliary cirrhosis, Behcet's disease, Crohn's disease, polymyositis, systemic lupus erythematosus and immune-related glomerulonephritis and rheumatoid arthritis) and viral infections (such as herpes viruses, pox viruses and adenoviruses), inflammation, graft v. host disease, acute graft rejection, and chronic graft rejection.

[0629] In preferred embodiments, polynucleotides, polypeptides, and/or agonists or antagonists of the invention are used to inhibit growth, progression, and/or metastasis of cancers, in particular those listed above.

[0630] Additional diseases or conditions associated with increased cell survival that could be diagnosed, prognosed, prevented, and/or treated by polynucleotides, polypeptides, and/or agonists or antagonists of the invention, include, but are not limited to, progression, and/or metastases of malignancies and related disorders such as leukemia (including acute leukemias (e.g., acute lymphocytic leukemia, acute myelocytic leukemia (including myeloblastic, promyelocytic, myelomonocytic, monocytic, and erythroleukemia)) and chronic leukemias (e.g., chronic myelocytic (granulocytic) leukemia and chronic lymphocytic leukemia)), polycythemia vera, lymphomas (e.g., Hodgkin's disease and non-Hodgkin's disease), multiple myeloma, Waldenstrom's macroglobulinemia, heavy chain disease, and solid tumors including, but not limited to, sarcomas and carcinomas such as fibrosarcoma, myxosarcoma, liposarcoma, chondrosarcoma, osteogenic sarcoma, chordoma, angiosarcoma, endotheliosarcoma, lymphangiosarcoma, lymphangioendotheliosarcoma, synovioma, mesothelioma, Ewing's tumor, leiomyosarcoma, rhabdomyosarcoma, colon carcinoma, pancreatic cancer, breast cancer, ovarian cancer, prostate cancer, squamous cell carcinoma, basal cell carcinoma, adenocarcinoma, sweat gland carcinoma, sebaceous gland carcinoma, papillary carcinoma, papillary adenocarcinomas, cystadenocarcinoma, medullary carcinoma, bronchogenic carcinoma, renal cell carcinoma, hepatoma, bile duct carcinoma, choriocarcinoma, seminoma, embryonal carcinoma, Wilm's tumor, cervical cancer, testicular tumor, lung carcinoma, small cell lung carcinoma, bladder carcinoma, epithelial carcinoma, glioma, astrocytoma, medulloblastoma, craniopharyngioma, ependymoma, pinealoma, emangioblastoma, acoustic neuroma, oligodendroglioma, menangioma, melanoma, neuroblastoma, and retinoblastoma.

[0631] Diseases associated with increased apoptosis that could be diagnosed, prognosed, prevented, and/or treated by polynucleotides, polypeptides, and/or agonists or antagonists of the invention, include AIDS; neurodegenerative disorders (such as Alzheimer's disease, Parkinson's disease, amyotrophic lateral sclerosis, retinitis pigmentosa, cerebellar degeneration and brain tumor or prior associated disease); autoimmune disorders (such as, multiple sclerosis, Sjogren's syndrome, Hashimoto's thyroiditis, biliary cirrhosis, Behcet's disease, Crohn's disease, polymyositis, systemic lupus erythematosus and immune-related glomerulonephritis and rheumatoid arthritis) myelodysplastic syndromes (such as aplastic anemia), graft v. host disease, ischemic injury (such as that caused by myocardial infarction, stroke and reperfusion injury), liver injury (e.g., hepatitis related liver injury, ischemia/reperfusion injury, cholestosis (bile duct injury) and liver cancer); toxin-induced liver disease (such as that caused by alcohol), septic shock, cachexia and anorexia.

[0632] Hyperproliferative diseases and/or disorders that could be diagnosed, prognosed, prevented, and/or treated by polynucleotides, polypeptides, and/or agonists or antagonists of the invention, include, but are not limited to, neoplasms located in the liver, abdomen, bone, breast, digestive system, pancreas, peritoneum, endocrine glands (adrenal, parathyroid, pituitary, testicles, ovary, thymus, thyroid), eye, head and neck, nervous system (central and peripheral), lymphatic system, pelvis, skin, soft tissue, spleen, thorax, and urogenital tract.

[0633] Similarly, other hyperproliferative disorders can also be diagnosed, prognosed, prevented, and/or treated by polynucleotides, polypeptides, and/or agonists or antagonists of the invention. Examples of such hyperproliferative disorders include, but are not limited to: hypergammaglobulinemia, lymphoproliferative disorders, paraproteinemias, purpura, sarcoidosis, Sezary Syndrome, Waldenstron's macroglobulinemia, Gaucher's Disease, histiocytosis, and any other hyperproliferative disease, besides neoplasia, located in an organ system listed above.

[0634] Another preferred embodiment utilizes polynucleotides of the present invention to inhibit aberrant cellular division, by gene therapy using the present invention, and/or protein fusions or fragments thereof.

[0635] Thus, the present invention provides a method for treating cell proliferative disorders by inserting into an abnormally proliferating cell a polynucleotide of the present invention, wherein said polynucleotide represses said expression.

[0636] Another embodiment of the present invention provides a method of treating cell-proliferative disorders in individuals comprising administration of one or more active gene copies of the present invention to an abnormally proliferating cell or cells. In a preferred embodiment, polynucleotides of the present invention is a DNA construct comprising a recombinant expression vector effective in expressing a DNA sequence encoding said polynucleotides. In another preferred embodiment of the present invention, the DNA construct encoding the poynucleotides of the present invention is inserted into cells to be treated utilizing a retrovirus, or more preferably an adenoviral vector (See G J. Nabel, et. al., PNAS 1999 96: 324-326, which is hereby incorporated by reference). In a most preferred embodiment, the viral vector is defective and will not transform non-proliferating cells, only proliferating cells. Moreover, in a preferred embodiment, the polynucleotides of the present invention inserted into proliferating cells either alone, or in combination with or fused to other polynucleotides, can then be modulated via an external stimulus (i.e. magnetic, specific small molecule, chemical, or drug administration, etc.), which acts upon the promoter upstream of said polynucleotides to induce expression of the encoded protein product. As such the beneficial therapeutic affect of the present invention may be expressly modulated (i.e. to increase, decrease, or inhibit expression of the present invention) based upon said external stimulus.

[0637] Polynucleotides of the present invention may be useful in repressing expression of oncogenic genes or antigens. By “repressing expression of the oncogenic genes” is intended the suppression of the transcription of the gene, the degradation of the gene transcript (pre-message RNA), the inhibition of splicing, the destruction of the messenger RNA, the prevention of the post-translational modifications of the protein, the destruction of the protein, or the inhibition of the normal function of the protein.

[0638] For local administration to abnormally proliferating cells, polynucleotides of the present invention may be administered by any method known to those of skill in the art including, but not limited to transfection, electroporation, microinjection of cells, or in vehicles such as liposomes, lipofectin, or as naked polynucleotides, or any other method described throughout the specification. The polynucleotide of the present invention may be delivered by known gene delivery systems such as, but not limited to, retroviral vectors (Gilboa, J. Virology 44:845 (1982); Hocke, Nature 320:275 (1986); Wilson, et al., Proc. Natl. Acad. Sci. U.S.A. 85:3014), vaccinia virus system (Chakrabarty et al., Mol. Cell Biol. 5:3403 (1985) or other efficient DNA delivery systems (Yates et al., Nature 313:812 (1985)) known to those skilled in the art. These references are exemplary only and are hereby incorporated by reference. In order to specifically deliver or transfect cells which are abnormally proliferating and spare non-dividing cells, it is preferable to utilize a retrovirus, or adenoviral (as described in the art and elsewhere herein) delivery system known to those of skill in the art. Since host DNA replication is required for retroviral DNA to integrate and the retrovirus will be unable to self replicate due to the lack of the retrovirus genes needed for its life cycle. Utilizing such a retroviral delivery system for polynucleotides of the present invention will target said gene and constructs to abnormally proliferating cells and will spare the non-dividing normal cells.

[0639] The polynucleotides of the present invention may be delivered directly to cell proliferative disorder/disease sites in internal organs, body cavities and the like by use of imaging devices used to guide an injecting needle directly to the disease site. The polynucleotides of the present invention may also be administered to disease sites at the time of surgical intervention.

[0640] By “cell proliferative disease” is meant any human or animal disease or disorder, affecting any one or any combination of organs, cavities, or body parts, which is characterized by single or multiple local abnormal proliferations of cells, groups of cells, or tissues, whether benign or malignant.

[0641] Any amount of the polynucleotides of the present invention may be administered as long as it has a biologically inhibiting effect on the proliferation of the treated cells. Moreover, it is possible to administer more than one of the polynucleotide of the present invention simultaneously to the same site. By “biologically inhibiting” is meant partial or total growth inhibition as well as decreases in the rate of proliferation or growth of the cells. The biologically inhibitory dose may be determined by assessing the effects of the polynucleotides of the present invention on target malignant or abnormally proliferating cell growth in tissue culture, tumor growth in animals and cell cultures, or any other method known to one of ordinary skill in the art.

[0642] The present invention is further directed to antibody-based therapies which involve administering of anti-polypeptides and anti-polynucleotide antibodies to a mammalian, preferably human, patient for treating one or more of the described disorders. Methods for producing anti-polypeptides and anti-polynucleotide antibodies polyclonal and monoclonal antibodies are described in detail elsewhere herein. Such antibodies may be provided in pharmaceutically acceptable compositions as known in the art or as described herein.

[0643] A summary of the ways in which the antibodies of the present invention may be used therapeutically includes binding polynucleotides or polypeptides of the present invention locally or systemically in the body or by direct cytotoxicity of the antibody, e.g. as mediated by complement (CDC) or by effector cells (ADCC). Some of these approaches are described in more detail below. Armed with the teachings provided herein, one of ordinary skill in the art will know how to use the antibodies of the present invention for diagnostic, monitoring or therapeutic purposes without undue experimentation.

[0644] In particular, the antibodies, fragments and derivatives of the present invention are useful for treating a subject having or developing cell proliferative and/or differentiation disorders as described herein. Such treatment comprises administering a single or multiple doses of the antibody, or a fragment, derivative, or a conjugate thereof.

[0645] The antibodies of this invention may be advantageously utilized in combination with other monoclonal or chimeric antibodies, or with lymphokines or hematopoietic growth factors, for example., which serve to increase the number or activity of effector cells which interact with the antibodies.

[0646] It is preferred to use high affinity and/or potent in vivo inhibiting and/or neutralizing antibodies against polypeptides or polynucleotides of the present invention, fragments or regions thereof, for both immunoassays directed to and therapy of disorders related to polynucleotides or polypeptides, including fragements thereof, of the present invention. Such antibodies, fragments, or regions, will preferably have an affinity for polynucleotides or polypeptides, including fragements thereof. Preferred binding affinities include those with a dissociation constant or Kd less than 5×10⁻⁶M, 10⁻⁶M, 5×10⁻⁷M, 10⁻⁷M, 5×10⁻⁸ M, 10⁻⁸M, 5×10⁻⁹M, 10⁻⁹M, 5×10⁻¹⁰M, 10⁻¹⁰M, 5×10⁻¹¹M, 10⁻¹¹M, 5×10⁻¹²M, 10¹²M, 5×10⁻¹³M, 10⁻¹³M, 5×10⁻¹⁴M, 10⁻¹⁴M, 5×10⁻¹⁵M, and 10⁻¹⁵M.

[0647] Moreover, polypeptides of the present invention are useful in inhibiting the angiogenesis of proliferative cells or tissues, either alone, as a protein fusion, or in combination with other polypeptides directly or indirectly, as described elsewhere herein. In a most preferred embodiment, said anti-angiogenesis effect may be achieved indirectly, for example, through the inhibition of hematopoietic, tumor-specific cells, such as tumor-associated macrophages (See Joseph I B, et al. J Natl Cancer Inst, 90(21):1648-53 (1998), which is hereby incorporated by reference). Antibodies directed to polypeptides or polynucleotides of the present invention may also result in inhibition of angiogenesis directly, or indirectly (See Witte L, et al., Cancer Metastasis Rev. 17(2):155-61 (1998), which is hereby incorporated by reference)).

[0648] Polypeptides, including protein fusions, of the present invention, or fragments thereof may be useful in inhibiting proliferative cells or tissues through the induction of apoptosis. Said polypeptides may act either directly, or indirectly to induce apoptosis of proliferative cells and tissues, for example in the activation of a death-domain receptor, such as tumor necrosis factor (TNF) receptor-1, CD95 (Fas/APO-1), TNF-receptor-related apoptosis-mediated protein (TRAMP) and TNF-related apoptosis-inducing ligand (TRAIL) receptor-I and -2 (See Schulze-Osthoff K, et.al., Eur J Biochem 254(3):439-59 (1998), which is hereby incorporated by reference). Moreover, in another preferred embodiment of the present invention, said polypeptides may induce apoptosis through other mechanisms, such as in the activation of other proteins which will activate apoptosis, or through stimulating the expression of said proteins, either alone or in combination with small molecule drugs or adjuviants, such as apoptonin, galectins, thioredoxins, anti-inflammatory proteins (See for example, Mutat Res 400(1-2):447-55 (1998), Med Hypotheses.50(5):423-33 (1998), Chem Biol Interact. Apr 24;111-112:23-34 (1998), J Mol Med.76(6):402-12 (1998), Int J Tissue React;20(1):3-15 (1998), which are all hereby incorporated by reference).

[0649] Polypeptides, including protein fusions to, or fragments thereof, of the present invention are useful in inhibiting the metastasis of proliferative cells or tissues. Inhibition may occur as a direct result of administering polypeptides, or antibodies directed to said polypeptides as described elsewere herein, or indirectly, such as activating the expression of proteins known to inhibit metastasis, for example alpha 4 integrins, (See, e.g., Curr Top Microbiol Immunol 1998;231:125-41, which is hereby incorporated by reference). Such thereapeutic affects of the present invention may be achieved either alone, or in combination with small molecule drugs or adjuvants.

[0650] In another embodiment, the invention provides a method of delivering compositions containing the polypeptides of the invention (e.g., compositions containing polypeptides or polypeptide antibodes associated with heterologous polypeptides, heterologous nucleic acids, toxins, or prodrugs) to targeted cells expressing the polypeptide of the present invention. Polypeptides or polypeptide antibodes of the invention may be associated with with heterologous polypeptides, heterologous nucleic acids, toxins, or prodrugs via hydrophobic, hydrophilic, ionic and/or covalent interactions.

[0651] Polypeptides, protein fusions to, or fragments thereof, of the present invention are useful in enhancing the immunogenicity and/or antigenicity of proliferating cells or tissues, either directly, such as would occur if the polypeptides of the present invention ‘vaccinated’ the immune response to respond to proliferative antigens and immunogens, or indirectly, such as in activating the expression of proteins known to enhance the immune response (e.g. chemokines), to said antigens and immunogens.

[0652] Renal Disorders

[0653] Polynucleotides, polypeptides, antibodies, and/or agonists or antagonists of the present invention, may be used to treat, prevent, diagnose, and/or prognose disorders of the renal system. Renal disorders which can be diagnosed, prognosed, prevented, and/or treated with compositions of the invention include, but are not limited to, kidney failure, nephritis, blood vessel disorders of kidney, metabolic and congenital kidney disorders, urinary disorders of the kidney, autoimmune disorders, sclerosis and necrosis, electrolyte imbalance, and kidney cancers.

[0654] Kidney diseases which can be diagnosed, prognosed, prevented, and/or treated with compositions of the invention include, but are not limited to, acute kidney failure, chronic kidney failure, atheroembolic renal failure, end-stage renal disease, inflammatory diseases of the kidney (e.g., acute glomerulonephritis, postinfectious glomerulonephritis, rapidly progressive glomerulonephritis, nephrotic syndrome, membranous glomerulonephritis, familial nephrotic syndrome, membranoproliferative glomerulonephritis I and II, mesangial proliferative glomerulonephritis, chronic glomerulonephritis, acute tubulointerstitial nephritis, chronic tubulointerstitial nephritis, acute post-streptococcal glomerulonephritis (PSGN), pyelonephritis, lupus nephritis, chronic nephritis, interstitial nephritis, and post-streptococcal glomerulonephritis), blood vessel disorders of the kidneys (e.g., kidney infarction, atheroembolic kidney disease, cortical necrosis, malignant nephrosclerosis, renal vein thrombosis, renal underperfusion, renal retinopathy, renal ischemia-reperfusion, renal artery embolism, and renal artery stenosis), and kidney disorders resulting form urinary tract disease (e.g., pyelonephritis, hydronephrosis, urolithiasis (renal lithiasis, nephrolithiasis), reflux nephropathy, urinary tract infections, urinary retention, and acute or chronic unilateral obstructive uropathy.)

[0655] In addition, compositions of the invention can be used to diagnose, prognose, prevent, and/or treat metabolic and congenital disorders of the kidney (e.g., uremia, renal amyloidosis, renal osteodystrophy, renal tubular acidosis, renal glycosuria, nephrogenic diabetes insipidus, cystinuria, Fanconi's syndrome, renal fibrocystic osteosis (renal rickets), Hartnup disease, Bartter's syndrome, Liddle's syndrome, polycystic kidney disease, medullary cystic disease, medullary sponge kidney, Alport's syndrome, nail-patella syndrome, congenital nephrotic syndrome, CRUSH syndrome, horseshoe kidney, diabetic nephropathy, nephrogenic diabetes insipidus, analgesic nephropathy, kidney stones, and membranous nephropathy), and autoimmune disorders of the kidney (e.g., systemic lupus erythematosus (SLE), Goodpasture syndrome, IgA nephropathy, and IgM mesangial proliferative glomerulonephritis).

[0656] Compositions of the invention can also be used to diagnose, prognose, prevent, and/or treat sclerotic or necrotic disorders of the kidney (e.g., glomerulosclerosis, diabetic nephropathy, focal segmental glomerulosclerosis (FSGS), necrotizing glomerulonephritis, and renal papillary necrosis), cancers of the kidney (e.g., nephroma, hypemephroma, nephroblastoma, renal cell cancer, transitional cell cancer, renal adenocarcinoma, squamous cell cancer, and Wilm's tumor), and electrolyte imbalances (e.g., nephrocalcinosis, pyuria, edema, hydronephritis, proteinuria, hyponatremia, hypernatremia, hypokalemia, hyperkalemia, hypocalcemia, hypercalcemia, hypophosphatemia, and hyperphosphatemia).

[0657] Polypeptides may be administered using any method known in the art, including, but not limited to, direct needle injection at the delivery site, intravenous injection, topical administration, catheter infusion, biolistic injectors, particle accelerators, gelfoam sponge depots, other commercially available depot materials, osmotic pumps, oral or suppositorial solid pharmaceutical formulations, decanting or topical applications during surgery, aerosol delivery. Such methods are known in the art. Polypeptides may be administered as part of a Therapeutic, described in more detail below. Methods of delivering polynucleotides are described in more detail herein. Cardiovascular Disorders

[0658] Polynucleotides or polypeptides, or agonists or antagonists of the present invention, may be used to treat, prevent, diagnose, and/or prognose cardiovascular disorders, including, but not limited to, peripheral artery disease, such as limb ischemia.

[0659] Cardiovascular disorders include, but are not limited to, cardiovascular abnormalities, such as arterio-arterial fistula, arteriovenous fistula, cerebral arteriovenous malformations, congenital heart defects, pulmonary atresia, and Scimitar Syndrome. Congenital heart defects include, but are not limited to, aortic coarctation, cor triatriatum, coronary vessel anomalies, crisscross heart, dextrocardia, patent ductus arteriosus, Ebstein's anomaly, Eisenmenger complex, hypoplastic left heart syndrome, levocardia, tetralogy of fallot, transposition of great vessels, double outlet right ventricle, tricuspid atresia, persistent truncus arteriosus, and heart septal defects, such as aortopulmonary septal defect, endocardial cushion defects, Lutembacher's Syndrome, trilogy of Fallot, ventricular heart septal defects.

[0660] Cardiovascular disorders also include, but are not limited to, heart disease, such as arrhythmias, carcinoid heart disease, high cardiac output, low cardiac output, cardiac tamponade, endocarditis (including bacterial), heart aneurysm, cardiac arrest, congestive heart failure, congestive cardiomyopathy, paroxysmal dyspnea, cardiac edema, heart hypertrophy, congestive cardiomyopathy, left ventricular hypertrophy, right ventricular hypertrophy, post-infarction heart rupture, ventricular septal rupture, heart valve diseases, myocardial diseases, myocardial ischemia, pericardial effusion, pericarditis (including constrictive and tuberculous), pneumopericardium, postpericardiotomy syndrome, pulmonary heart disease, rheumatic heart disease, ventricular dysfunction, hyperemia, cardiovascular pregnancy complications, Scimitar Syndrome, cardiovascular syphilis, and cardiovascular tuberculosis.

[0661] Arrhythmias include, but are not limited to, sinus arrhythmia, atrial fibrillation, atrial flutter, bradycardia, extrasystole, Adams-Stokes Syndrome, bundle-branch block, sinoatrial block, long QT syndrome, parasystole, Lown-Ganong-Levine Syndrome, Mahaim-type pre-excitation syndrome, Wolff-Parkinson-White syndrome, sick sinus syndrome, tachycardias, and ventricular fibrillation. Tachycardias include paroxysmal tachycardia, supraventricular tachycardia, accelerated idioventricular rhythm, atrioventricular nodal reentry tachycardia, ectopic atrial tachycardia, ectopic junctional tachycardia, sinoatrial nodal reentry tachycardia, sinus tachycardia, Torsades de Pointes, and ventricular tachycardia.

[0662] Heart valve diseases include, but are not limited to, aortic valve insufficiency, aortic valve stenosis, hear murmurs, aortic valve prolapse, mitral valve prolapse, tricuspid valve prolapse, mitral valve insufficiency, mitral valve stenosis, pulmonary atresia, pulmonary valve insufficiency, pulmonary valve stenosis, tricuspid atresia, tricuspid valve insufficiency, and tricuspid valve stenosis.

[0663] Myocardial diseases include, but are not limited to, alcoholic cardiomyopathy, congestive cardiomyopathy, hypertrophic cardiomyopathy, aortic subvalvular stenosis, pulmonary subvalvular stenosis, restrictive cardiomyopathy, Chagas cardiomyopathy, endocardial fibroelastosis, endomyocardial fibrosis, Kearns Syndrome, myocardial reperfusion injury, and myocarditis.

[0664] Myocardial ischemias include, but are not limited to, coronary disease, such as angina pectoris, coronary aneurysm, coronary arteriosclerosis, coronary thrombosis, coronary vasospasm, myocardial infarction and myocardial stunning.

[0665] Cardiovascular diseases also include vascular diseases such as aneurysms, angiodysplasia, angiomatosis, bacillary angiomatosis, Hippel-Lindau Disease, Klippel-Trenaunay-Weber Syndrome, Sturge-Weber Syndrome, angioneurotic edema, aortic diseases, Takayasu's Arteritis, aortitis, Leriche's Syndrome, arterial occlusive diseases, arteritis, enarteritis, polyarteritis nodosa, cerebrovascular disorders, diabetic angiopathies, diabetic retinopathy, embolisms, thrombosis, erythromelalgia, hemorrhoids, hepatic veno-occlusive disease, hypertension, hypotension, ischemia, peripheral vascular diseases, phlebitis, pulmonary veno-occlusive disease, Raynaud's disease, CREST syndrome, retinal vein occlusion, Scimitar syndrome, superior vena cava syndrome, telangiectasia, atacia telangiectasia, hereditary hemorrhagic telangiectasia, varicocele, varicose veins, varicose ulcer, vasculitis, and venous insufficiency.

[0666] Aneurysms include, but are not limited to, dissecting aneurysms, false aneurysms, infected aneurysms, ruptured aneurysms, aortic aneurysms, cerebral aneurysms, coronary aneurysms, heart aneurysms, and iliac aneurysms.

[0667] Arterial occlusive diseases include, but are not limited to, arteriosclerosis, intermittent claudication, carotid stenosis, fibromuscular dysplasias, mesenteric vascular occlusion, Moyamoya disease, renal artery obstruction, retinal artery occlusion, and thromboangiitis obliterans.

[0668] Cerebrovascular disorders include, but are not limited to, carotid artery diseases, cerebral amyloid angiopathy, cerebral aneurysm, cerebral anoxia, cerebral arteriosclerosis, cerebral arteriovenous malformation, cerebral artery diseases, cerebral embolism and thrombosis, carotid artery thrombosis, sinus thrombosis, Wallenberg's syndrome, cerebral hemorrhage, epidural hematoma, subdural hematoma, subaraxhnoid hemorrhage, cerebral infarction, cerebral ischemia (including transient), subclavian steal syndrome, periventricular leukomalacia, vascular headache, cluster headache, migraine, and vertebrobasilar insufficiency.

[0669] Embolisms include, but are not limited to, air embolisms, amniotic fluid embolisms, cholesterol embolisms, blue toe syndrome, fat embolisms, pulmonary embolisms, and thromoboembolisms. Thrombosis include, but are not limited to, coronary thrombosis, hepatic vein thrombosis, retinal vein occlusion, carotid artery thrombosis, sinus thrombosis, Wallenberg's syndrome, and thrombophlebitis.

[0670] Ischemic disorders include, but are not limited to, cerebral ischemia, ischemic colitis, compartment syndromes, anterior compartment syndrome, myocardial ischemia, reperfusion injuries, and peripheral limb ischemia. Vasculitis includes, but is not limited to, aortitis, arteritis, Behcet's Syndrome, Churg-Strauss Syndrome, mucocutaneous lymph node syndrome, thromboangiitis obliterans, hypersensitivity vasculitis, Schoenlein-Henoch purpura, allergic cutaneous vasculitis, and Wegener's granulomatosis.

[0671] Polypeptides may be administered using any method known in the art, including, but not limited to, direct needle injection at the delivery site, intravenous injection, topical administration, catheter infusion, biolistic injectors, particle accelerators, gelfoam sponge depots, other commercially available depot materials, osmotic pumps, oral or suppositorial solid pharmaceutical formulations, decanting or topical applications during surgery, aerosol delivery. Such methods are known in the art. Polypeptides may be administered as part of a Therapeutic, described in more detail below. Methods of delivering polynucleotides are described in more detail herein.

[0672] Respiratory Disorders

[0673] Polynucleotides or polypeptides, or agonists or antagonists of the present invention may be used to treat, prevent, diagnose, and/or prognose diseases and/or disorders of the respiratory system.

[0674] Diseases and disorders of the respiratory system include, but are not limited to, nasal vestibulitis, nonallergic rhinitis (e.g., acute rhinitis, chronic rhinitis, atrophic rhinitis, vasomotor rhinitis), nasal polyps, and sinusitis, juvenile angiofibromas, cancer of the nose and juvenile papillomas, vocal cord polyps, nodules (singer's nodules), contact ulcers, vocal cord paralysis, laryngoceles, pharyngitis (e.g., viral and bacterial), tonsillitis, tonsillar cellulitis, parapharyngeal abscess, laryngitis, laryngoceles, and throat cancers (e.g., cancer of the nasopharynx, tonsil cancer, larynx cancer), lung cancer (e.g., squamous cell carcinoma, small cell (oat cell) carcinoma, large cell carcinoma, and adenocarcinoma), allergic disorders (eosinophilic pneumonia, hypersensitivity pneumonitis (e.g., extrinsic allergic alveolitis, allergic interstitial pneumonitis, organic dust pneumoconiosis, allergic bronchopulmonary aspergillosis, asthma, Wegener's granulomatosis (granulomatous vasculitis), Goodpasture's syndrome)), pneumonia (e.g., bacterial pneumonia (e.g., Streptococcus pneumoniae (pneumoncoccal pneumonia), Staphylococcus aureus (staphylococcal pneumonia), Gram-negative bacterial pneumonia (caused by, e.g., Klebsiella and Pseudomas spp.), Mycoplasma pneumoniae pneumonia, Hemophilus influenzae pneumonia, Legionella pneumophila (Legionnaires' disease), and Chlamydia psittaci (Psittacosis)), and viral pneumonia (e.g., influenza, chickenpox (varicella).

[0675] Additional diseases and disorders of the respiratory system include, but are not limited to bronchiolitis, polio (poliomyelitis), croup, respiratory syncytial viral infection, mumps, erythema infectiosum (fifth disease), roseola infantum, progressive rubella panencephalitis, german measles, and subacute sclerosing panencephalitis), fungal pneumonia (e.g., Histoplasmosis, Coccidioidomycosis, Blastomycosis, fungal infections in people with severely suppressed immune systems (e.g., cryptococcosis, caused by Cryptococcus neoformans; aspergillosis, caused by Aspergillus spp.; candidiasis, caused by Candida; and mucormycosis)), Pneumocystis carinii (pneumocystis pneumonia), atypical pneumonias (e.g., Mycoplasma and Chlamydia spp.), opportunistic infection pneumonia, nosocomial pneumonia, chemical pneumonitis, and aspiration pneumonia, pleural disorders (e.g., pleurisy, pleural effusion, and pneumothorax (e.g., simple spontaneous pneumothorax, complicated spontaneous pneumothorax, tension pneumothorax)), obstructive airway diseases (e.g., asthma, chronic obstructive pulmonary disease (COPD), emphysema, chronic or acute bronchitis), occupational lung diseases (e.g., silicosis, black lung (coal workers' pneumoconiosis), asbestosis, berylliosis, occupational asthsma, byssinosis, and benign pneumoconioses), Infiltrative Lung Disease (e.g., pulmonary fibrosis (e.g., fibrosing alveolitis, usual interstitial pneumonia), idiopathic pulmonary fibrosis, desquamative interstitial pneumonia, lymphoid interstitial pneumonia, histiocytosis X (e.g., Letterer-Siwe disease, Hand-Schiller-Christian disease, eosinophilic granuloma), idiopathic pulmonary hemosiderosis, sarcoidosis and pulmonary alveolar proteinosis), Acute respiratory distress syndrome (also called, e.g., adult respiratory distress syndrome), edema, pulmonary embolism, bronchitis (e.g., viral, bacterial), bronchiectasis, atelectasis, lung abscess (caused by, e.g., Staphylococcus aureus or Legionella pneumophila), and cystic fibrosis.

[0676] Anti-angiogenesis Activity

[0677] The naturally occurring balance between endogenous stimulators and inhibitors of angiogenesis is one in which inhibitory influences predominate. Rastinejad et al., Cell 56:345-355 (1989). In those rare instances in which neovascularization occurs under normal physiological conditions, such as wound healing, organ regeneration, embryonic development, and female reproductive processes, angiogenesis is stringently regulated and spatially and temporally delimited. Under conditions of pathological angiogenesis such as that characterizing solid tumor growth, these regulatory controls fail. Unregulated angiogenesis becomes pathologic and sustains progression of many neoplastic and non-neoplastic diseases. A number of serious diseases are dominated by abnormal neovascularization including solid tumor growth and metastases, arthritis, some types of eye disorders, and psoriasis. See, e.g., reviews by Moses et al., Biotech. 9:630-634 (1991); Folkman et al., N. Engl. J Med., 333:1757-1763 (1995); Auerbach et al., J. Microvasc. Res. 29:401-411 (1985); Folkman, Advances in Cancer Research, eds. Klein and Weinhouse, Academic Press, New York, pp. 175-203 (1985); Patz, Am. J. Opthalmol. 94:715-743 (1982); and Folkman et al., Science 221:719-725 (1983). In a number of pathological conditions, the process of angiogenesis contributes to the disease state. For example, significant data have accumulated which suggest that the growth of solid tumors is dependent on angiogenesis. Folkman and Klagsbrun, Science 235:442-447 (1987).

[0678] The present invention provides for treatment of diseases or disorders associated with neovascularization by administration of the polynucleotides and/or polypeptides of the invention, as well as agonists or antagonists of the present invention. Malignant and metastatic conditions which can be treated with the polynucleotides and polypeptides, or agonists or antagonists of the invention include, but are not limited to, malignancies, solid tumors, and cancers described herein and otherwise known in the art (for a review of such disorders, see Fishman et al., Medicine, 2d Ed., J. B. Lippincott Co., Philadelphia (1985)).Thus, the present invention provides a method of treating an angiogenesis-related disease and/or disorder, comprising administering to an individual in need thereof a therapeutically effective amount of a polynucleotide, polypeptide, antagonist and/or agonist of the invention. For example, polynucleotides, polypeptides, antagonists and/or agonists may be utilized in a variety of additional methods in order to therapeutically treat a cancer or tumor. Cancers which may be treated with polynucleotides, polypeptides, antagonists and/or agonists include, but are not limited to solid tumors, including prostate, lung, breast, ovarian, stomach, pancreas, larynx, esophagus, testes, liver, parotid, biliary tract, colon, rectum, cervix, uterus, endometrium, kidney, bladder, thyroid cancer; primary tumors and metastases; melanomas; glioblastoma; Kaposi's sarcoma; leiomyosarcoma; non-small cell lung cancer; colorectal cancer; advanced malignancies; and blood born tumors such as leukemias. For example, polynucleotides, polypeptides, antagonists and/or agonists may be delivered topically, in order to treat cancers such as skin cancer, head and neck tumors, breast tumors, and Kaposi's sarcoma.

[0679] Within yet other aspects, polynucleotides, polypeptides, antagonists and/or agonists may be utilized to treat superficial forms of bladder cancer by, for example, intravesical administration. Polynucleotides, polypeptides, antagonists and/or agonists may be delivered directly into the tumor, or near the tumor site, via injection or a catheter. Of course, as the artisan of ordinary skill will appreciate, the appropriate mode of administration will vary according to the cancer to be treated. Other modes of delivery are discussed herein.

[0680] Polynucleotides, polypeptides, antagonists and/or agonists may be useful in treating other disorders, besides cancers, which involve angiogenesis. These disorders include, but are not limited to: benign tumors, for example hemangiomas, acoustic neuromas, neurofibromas, trachomas, and pyogenic granulomas; artheroscleric plaques; ocular angiogenic diseases, for example, diabetic retinopathy, retinopathy of prematurity, macular degeneration, corneal graft rejection, neovascular glaucoma, retrolental fibroplasia, rubeosis, retinoblastoma, uvietis and Pterygia (abnormal blood vessel growth) of the eye; rheumatoid arthritis; psoriasis; delayed wound healing; endometriosis; vasculogenesis; granulations; hypertrophic scars (keloids); nonunion fractures; scleroderma; trachoma; vascular adhesions; myocardial angiogenesis; coronary collaterals; cerebral collaterals; arteriovenous malformations; ischemic limb angiogenesis; Osler-Webber Syndrome; plaque neovascularization; telangiectasia; hemophiliac joints; angiofibroma; fibromuscular dysplasia; wound granulation; Crohn's disease; and atherosclerosis.

[0681] For example, within one aspect of the present invention methods are provided for treating hypertrophic scars and keloids, comprising the step of administering a polynucleotide, polypeptide, antagonist and/or agonist of the invention to a hypertrophic scar or keloid.

[0682] Within one embodiment of the present invention polynucleotides, polypeptides, antagonists and/or agonists of the invention are directly injected into a hypertrophic scar or keloid, in order to prevent the progression of these lesions. This therapy is of particular value in the prophylactic treatment of conditions which are known to result in the development of hypertrophic scars and keloids (e.g., bums), and is preferably initiated after the proliferative phase has had time to progress (approximately 14 days after the initial injury), but before hypertrophic scar or keloid development. As noted above, the present invention also provides methods for treating neovascular diseases of the eye, including for example, corneal neovascularization, neovascular glaucoma, proliferative diabetic retinopathy, retrolental fibroplasia and macular degeneration.

[0683] Moreover, Ocular disorders associated with neovascularization which can be treated with the polynucleotides and polypeptides of the present invention (including agonists and/or antagonists) include, but are not limited to: neovascular glaucoma, diabetic retinopathy, retinoblastoma, retrolental fibroplasia, uveitis, retinopathy of prematurity macular degeneration, corneal graft neovascularization, as well as other eye inflammatory diseases, ocular tumors and diseases associated with choroidal or iris neovascularization. See, e.g., reviews by Waltman et al., Am. J. Ophthal. 85:704-710 (1978) and Gartner et al., Surv. Ophthal. 22:291-312 (1978).

[0684] Thus, within one aspect of the present invention methods are provided for treating neovascular diseases of the eye such as corneal neovascularization (including corneal graft neovascularization), comprising the step of administering to a patient a therapeutically effective amount of a compound (as described above) to the cornea, such that the formation of blood vessels is inhibited. Briefly, the cornea is a tissue which normally lacks blood vessels. In certain pathological conditions however, capillaries may extend into the cornea from the pericorneal vascular plexus of the limbus. When the cornea becomes vascularized, it also becomes clouded, resulting in a decline in the patient's visual acuity. Visual loss may become complete if the cornea completely opacitates. A wide variety of disorders can result in corneal neovascularization, including for example, corneal infections (e.g., trachoma, herpes simplex keratitis, leishmaniasis and onchocerciasis), immunological processes (e.g., graft rejection and Stevens-Johnson's syndrome), alkali burns, trauma, inflammation (of any cause), toxic and nutritional deficiency states, and as a complication of wearing contact lenses.

[0685] Within particularly preferred embodiments of the invention, may be prepared for topical administration in saline (combined with any of the preservatives and antimicrobial agents commonly used in ocular preparations), and administered in eyedrop form. The solution or suspension may be prepared in its pure form and administered several times daily. Alternatively, anti-angiogenic compositions, prepared as described above, may also be administered directly to the cornea. Within preferred embodiments, the anti-angiogenic composition is prepared with a muco-adhesive polymer which binds to cornea. Within further embodiments, the anti-angiogenic factors or anti-angiogenic compositions may be utilized as an adjunct to conventional steroid therapy. Topical therapy may also be useful prophylactically in corneal lesions which are known to have a high probability of inducing an angiogenic response (such as chemical burns). In these instances the treatment, likely in combination with steroids, may be instituted immediately to help prevent subsequent complications.

[0686] Within other embodiments, the compounds described above may be injected directly into the corneal stroma by an ophthalmologist under microscopic guidance. The preferred site of injection may vary with the morphology of the individual lesion, but the goal of the administration would be to place the composition at the advancing front of the vasculature (i.e., interspersed between the blood vessels and the normal cornea). In most cases this would involve perilimbic corneal injection to “protect” the cornea from the advancing blood vessels. This method may also be utilized shortly after a corneal insult in order to prophylactically prevent corneal neovascularization. In this situation the material could be injected in the perilimbic cornea interspersed between the corneal lesion and its undesired potential limbic blood supply. Such methods may also be utilized in a similar fashion to prevent capillary invasion of transplanted corneas. In a sustained-release form injections might only be required 2-3 times per year. A steroid could also be added to the injection solution to reduce inflammation resulting from the injection itself.

[0687] Within another aspect of the present invention, methods are provided for treating neovascular glaucoma, comprising the step of administering to a patient a therapeutically effective amount of a polynucleotide, polypeptide, antagonist and/or agonist to the eye, such that the formation of blood vessels is inhibited. In one embodiment, the compound may be administered topically to the eye in order to treat early forms of neovascular glaucoma. Within other embodiments, the compound may be implanted by injection into the region of the anterior chamber angle. Within other embodiments, the compound may also be placed in any location such that the compound is continuously released into the aqueous humor. Within another aspect of the present invention, methods are provided for treating proliferative diabetic retinopathy, comprising the step of administering to a patient a therapeutically effective amount of a polynucleotide, polypeptide, antagonist and/or agonist to the eyes, such that the formation of blood vessels is inhibited.

[0688] Within particularly preferred embodiments of the invention, proliferative diabetic retinopathy may be treated by injection into the aqueous humor or the vitreous, in order to increase the local concentration of the polynucleotide, polypeptide, antagonist and/or agonist in the retina. Preferably, this treatment should be initiated prior to the acquisition of severe disease requiring photocoagulation.

[0689] Within another aspect of the present invention, methods are provided for treating retrolental fibroplasia, comprising the step of administering to a patient a therapeutically effective amount of a polynucleotide, polypeptide, antagonist and/or agonist to the eye, such that the formation of blood vessels is inhibited. The compound may be administered topically, via intravitreous injection and/or via intraocular implants.

[0690] Additionally, disorders which can be treated with the polynucleotides, polypeptides, agonists and/or agonists include, but are not limited to, hemangioma, arthritis, psoriasis, angiofibroma, atherosclerotic plaques, delayed wound healing, granulations, hemophilic joints, hypertrophic scars, nonunion fractures, Osler-Weber syndrome, pyogenic granuloma, scleroderma, trachoma, and vascular adhesions.

[0691] Moreover, disorders and/or states, which can be treated, prevented, diagnosed, and/or prognosed with the the polynucleotides, polypeptides, agonists and/or agonists of the invention include, but are not limited to, solid tumors, blood born tumors such as leukemias, tumor metastasis, Kaposi's sarcoma, benign tumors, for example hemangiomas, acoustic neuromas, neurofibromas, trachomas, and pyogenic granulomas, rheumatoid arthritis, psoriasis, ocular angiogenic diseases, for example, diabetic retinopathy, retinopathy of prematurity, macular degeneration, corneal graft rejection, neovascular glaucoma, retrolental fibroplasia, rubeosis, retinoblastoma, and uvietis, delayed wound healing, endometriosis, vascluogenesis, granulations, hypertrophic scars (keloids), nonunion fractures, scleroderma, trachoma, vascular adhesions, myocardial angiogenesis, coronary collaterals, cerebral collaterals, arteriovenous malformations, ischemic limb angiogenesis, Osler-Webber Syndrome, plaque neovascularization, telangiectasia, hemophiliac joints, angiofibroma fibromuscular dysplasia, wound granulation, Crohn's disease, atherosclerosis, birth control agent by preventing vascularization required for embryo implantation controlling menstruation, diseases that have angiogenesis as a pathologic consequence such as cat scratch disease (Rochele minalia quintosa), ulcers (Helicobacter pylori), Bartonellosis and bacillary angiomatosis.

[0692] In one aspect of the birth control method, an amount of the compound sufficient to block embryo implantation is administered before or after intercourse and fertilization have occurred, thus providing an effective method of birth control, possibly a “morning after” method. Polynucleotides, polypeptides, agonists and/or agonists may also be used in controlling menstruation or administered as either a peritoneal lavage fluid or for peritoneal implantation in the treatment of endometriosis.

[0693] Polynucleotides, polypeptides, agonists and/or agonists of the present invention may be incorporated into surgical sutures in order to prevent stitch granulomas.

[0694] Polynucleotides, polypeptides, agonists and/or agonists may be utilized in a wide variety of surgical procedures. For example, within one aspect of the present invention a compositions (in the form of, for example, a spray or film) may be utilized to coat or spray an area prior to removal of a tumor, in order to isolate normal surrounding tissues from malignant tissue, and/or to prevent the spread of disease to surrounding tissues. Within other aspects of the present invention, compositions (e.g., in the form of a spray) may be delivered via endoscopic procedures in order to coat tumors, or inhibit angiogenesis in a desired locale. Within yet other aspects of the present invention, surgical meshes which have been coated with anti-angiogenic compositions of the present invention may be utilized in any procedure wherein a surgical mesh might be utilized. For example, within one embodiment of the invention a surgical mesh laden with an anti-angiogenic composition may be utilized during abdominal cancer resection surgery (e.g., subsequent to colon resection) in order to provide support to the structure, and to release an amount of the anti-angiogenic factor.

[0695] Within further aspects of the present invention, methods are provided for treating tumor excision sites, comprising administering a polynucleotide, polypeptide, agonist and/or agonist to the resection margins of a tumor subsequent to excision, such that the local recurrence of cancer and the formation of new blood vessels at the site is inhibited. Within one embodiment of the invention, the anti-angiogenic compound is administered directly to the tumor excision site (e.g., applied by swabbing, brushing or otherwise coating the resection margins of the tumor with the anti-angiogenic compound). Alternatively, the anti-angiogenic compounds may be incorporated into known surgical pastes prior to administration. Within particularly preferred embodiments of the invention, the anti-angiogenic compounds are applied after hepatic resections for malignancy, and after neurosurgical operations.

[0696] Within one aspect of the present invention, polynucleotides, polypeptides, agonists and/or agonists may be administered to the resection margin of a wide variety of tumors, including for example, breast, colon, brain and hepatic tumors. For example, within one embodiment of the invention, anti-angiogenic compounds may be administered to the site of a neurological tumor subsequent to excision, such that the formation of new blood vessels at the site are inhibited.

[0697] The polynucleotides, polypeptides, agonists and/or agonists of the present invention may also be administered along with other anti-angiogenic factors. Representative examples of other anti-angiogenic factors include: Anti-Invasive Factor, retinoic acid and derivatives thereof, paclitaxel, Suramin, Tissue Inhibitor of Metalloproteinase-1, Tissue Inhibitor of Metalloproteinase-2, Plasminogen Activator Inhibitor-1, Plasminogen Activator Inhibitor-2, and various forms of the lighter “d group” transition metals.

[0698] Lighter “d group” transition metals include, for example, vanadium, molybdenum, tungsten, titanium, niobium, and tantalum species. Such transition metal species may form transition metal complexes. Suitable complexes of the above-mentioned transition metal species include oxo transition metal complexes.

[0699] Representative examples of vanadium complexes include oxo vanadium complexes such as vanadate and vanadyl complexes. Suitable vanadate complexes include metavanadate and orthovanadate complexes such as, for example, ammonium metavanadate, sodium metavanadate, and sodium orthovanadate. Suitable vanadyl complexes include, for example, vanadyl acetylacetonate and vanadyl sulfate including vanadyl sulfate hydrates such as vanadyl sulfate mono- and trihydrates.

[0700] Representative examples of tungsten and molybdenum complexes also include oxo complexes. Suitable oxo tungsten complexes include tungstate and tungsten oxide complexes. Suitable tungstate complexes include ammonium tungstate, calcium tungstate, sodium tungstate dihydrate, and tungstic acid. Suitable tungsten oxides include tungsten (IV) oxide and tungsten (VI) oxide. Suitable oxo molybdenum complexes include molybdate, molybdenum oxide, and molybdenyl complexes. Suitable molybdate complexes include ammonium molybdate and its hydrates, sodium molybdate and its hydrates, and potassium molybdate and its hydrates. Suitable molybdenum oxides include molybdenum (VI) oxide, molybdenum (VI) oxide, and molybdic acid. Suitable molybdenyl complexes include, for example, molybdenyl acetylacetonate. Other suitable tungsten and molybdenum complexes include hydroxo derivatives derived from, for example, glycerol, tartaric acid, and sugars.

[0701] A wide variety of other anti-angiogenic factors may also be utilized within the context of the present invention. Representative examples include platelet factor 4; protamine sulphate; sulphated chitin derivatives (prepared from queen crab shells), (Murata et al., Cancer Res. 51:22-26, 1991); Sulphated Polysaccharide Peptidoglycan Complex (SP-PG) (the function of this compound may be enhanced by the presence of steroids such as estrogen, and tamoxifen citrate); Staurosporine; modulators of matrix metabolism, including for example, proline analogs, cishydroxyproline, d,L-3,4-dehydroproline, Thiaproline, alpha,alpha-dipyridyl, aminopropionitrile fumarate; 4-propyl-5-(4-pyridinyl)-2(3H)-oxazolone; Methotrexate; Mitoxantrone; Heparin; Interferons; 2 Macroglobulin-serum; ChIMP-3 (Pavloff et al., J. Bio. Chem. 267:17321-17326, 1992); Chymostatin (Tomkinson et al., Biochem J. 286:475-480, 1992); Cyclodextrin Tetradecasulfate; Eponemycin; Camptothecin; Fumagillin (Ingber et al., Nature 348:555-557, 1990); Gold Sodium Thiomalate (“GST”; Matsubara and Ziff, J. Clin. Invest. 79:1440-1446, 1987); anticollagenase-serum; alpha2-antiplasmin (Holmes et al., J. Biol. Chem. 262(4):1659-1664, 1987); Bisantrene (National Cancer Institute); Lobenzarit disodium (N-(2)-carboxyphenyl-4-chloroanthronilic acid disodium or “CCA”; Takeuchi et al., Agents Actions 36:312-316, 1992); Thalidomide; Angostatic steroid; AGM-1470; carboxynaminolmidazole; and metalloproteinase inhibitors such as BB94.

[0702] Diseases at the Cellular Level

[0703] Diseases associated with increased cell survival or the inhibition of apoptosis that could be treated, prevented, diagnosed, and/or prognosed using polynucleotides or polypeptides, as well as antagonists or agonists of the present invention, include cancers (such as follicular lymphomas, carcinomas with p53 mutations, and hormone-dependent tumors, including, but not limited to colon cancer, cardiac tumors, pancreatic cancer, melanoma, retinoblastoma, glioblastoma, lung cancer, intestinal cancer, testicular cancer, stomach cancer, neuroblastoma, myxoma, myoma, lymphoma, endothelioma, osteoblastoma, osteoclastoma, osteosarcoma, chondrosarcoma, adenoma, breast cancer, prostate cancer, Kaposi's sarcoma and ovarian cancer); autoimmune disorders (such as, multiple sclerosis, Sjogren's syndrome, Hashimoto's thyroiditis, biliary cirrhosis, Behcet's disease, Crohn's disease, polymyositis, systemic lupus erythematosus and immune-related glomerulonephritis and rheumatoid arthritis) and viral infections (such as herpes viruses, pox viruses and adenoviruses), inflammation, graft v. host disease, acute graft rejection, and chronic graft rejection.

[0704] In preferred embodiments, polynucleotides, polypeptides, and/or antagonists of the invention are used to inhibit growth, progression, and/or metasis of cancers, in particular those listed above.

[0705] Additional diseases or conditions associated with increased cell survival that could be treated or detected by polynucleotides or polypeptides, or agonists or antagonists of the present invention include, but are not limited to, progression, and/or metastases of malignancies and related disorders such as leukemia (including acute leukemias (e.g., acute lymphocytic leukemia, acute myelocytic leukemia (including myeloblastic, promyelocytic, myelomonocytic, monocytic, and erythroleukemia)) and chronic leukemias (e.g., chronic myelocytic (granulocytic) leukemia and chronic lymphocytic leukemia)), polycythemia vera, lymphomas (e.g., Hodgkin's disease and non-Hodgkin's disease), multiple myeloma, Waldenstrom's macroglobulinemia, heavy chain disease, and solid tumors including, but not limited to, sarcomas and carcinomas such as fibrosarcoma, myxosarcoma, liposarcoma, chondrosarcoma, osteogenic sarcoma, chordoma, angiosarcoma, endotheliosarcoma, lymphangiosarcoma, lymphangioendotheliosarcoma, synovioma, mesothelioma, Ewing's tumor, leiomyosarcoma, rhabdomyosarcoma, colon carcinoma, pancreatic cancer, breast cancer, ovarian cancer, prostate cancer, squamous cell carcinoma, basal cell carcinoma, adenocarcinoma, sweat gland carcinoma, sebaceous gland carcinoma, papillary carcinoma, papillary adenocarcinomas, cystadenocarcinoma, medullary carcinoma, bronchogenic carcinoma, renal cell carcinoma, hepatoma, bile duct carcinoma, choriocarcinoma, seminoma, embryonal carcinoma, Wilm's tumor, cervical cancer, testicular tumor, lung carcinoma, small cell lung carcinoma, bladder carcinoma, epithelial carcinoma, glioma, astrocytoma, medulloblastoma, craniopharyngioma, ependymoma, pinealoma, hemangioblastoma, acoustic neuroma, oligodendroglioma, menangioma, melanoma, neuroblastoma, and retinoblastoma.

[0706] Diseases associated with increased apoptosis that could be treated, prevented, diagnosed, and/or prognesed using polynucleotides or polypeptides, as well as agonists or antagonists of the present invention, include, but are not limited to, AIDS; neurodegenerative disorders (such as Alzheimer's disease, Parkinson's disease, Amyotrophic lateral sclerosis, Retinitis pigmentosa, Cerebellar degeneration and brain tumor or prior associated disease); autoimmune disorders (such as, multiple sclerosis, Sjogren's syndrome, Hashimoto's thyroiditis, biliary cirrhosis, Behcet's disease, Crohn's disease, polymyositis, systemic lupus erythematosus and immune-related glomerulonephritis and rheumatoid arthritis) myelodysplastic syndromes (such as aplastic anemia), graft v. host disease, ischemic injury (such as that caused by myocardial infarction, stroke and reperfusion injury), liver injury (e.g., hepatitis related liver injury, ischemia/reperfusion injury, cholestosis (bile duct injury) and liver cancer); toxin-induced liver disease (such as that caused by alcohol), septic shock, cachexia and anorexia.

[0707] Wound Healing and Epithelial Cell Proliferation

[0708] In accordance with yet a further aspect of the present invention, there is provided a process for utilizing polynucleotides or polypeptides, as well as agonists or antagonists of the present invention, for therapeutic purposes, for example, to stimulate epithelial cell proliferation and basal keratinocytes for the purpose of wound healing, and to stimulate hair follicle production and healing of dermal wounds. Polynucleotides or polypeptides, as well as agonists or antagonists of the present invention, may be clinically useful in stimulating wound healing including surgical wounds, excisional wounds, deep wounds involving damage of the dermis and epidermis, eye tissue wounds, dental tissue wounds, oral cavity wounds, diabetic ulcers, dermal ulcers, cubitus ulcers, arterial ulcers, venous stasis ulcers, bums resulting from heat exposure or chemicals, and other abnormal wound healing conditions such as uremia, malnutrition, vitamin deficiencies and complications associated with systemic treatment with steroids, radiation therapy and antineoplastic drugs and antimetabolites. Polynucleotides or polypeptides, as well as agonists or antagonists of the present invention, could be used to promote dermal reestablishment subsequent to dermal loss.

[0709] Polynucleotides or polypeptides, as well as agonists or antagonists of the present invention, could be used to increase the adherence of skin grafts to a wound bed and to stimulate re-epithelialization from the wound bed. The following are types of grafts that polynucleotides or polypeptides, agonists or antagonists of the present invention, could be used to increase adherence to a wound bed: autografts, artificial skin, allografts, autodermic graft, autoepdermic grafts, avacular grafts, Blair-Brown grafts, bone graft, brephoplastic grafts, cutis graft, delayed graft, dermic graft, epidermic graft, fascia graft, full thickness graft, heterologous graft, xenograft, homologous graft, hyperplastic graft, lamellar graft, mesh graft, mucosal graft, Ollier-Thiersch graft, omenpal graft, patch graft, pedicle graft, penetrating graft, split skin graft, thick split graft. Polynucleotides or polypeptides, as well as agonists or antagonists of the present invention, can be used to promote skin strength and to improve the appearance of aged skin.

[0710] It is believed that polynucleotides or polypeptides, as well as agonists or antagonists of the present invention, will also produce changes in hepatocyte proliferation, and epithelial cell proliferation in the lung, breast, pancreas, stomach, small intestine, and large intestine. Polynucleotides or polypeptides, as well as agonists or antagonists of the present invention, could promote proliferation of epithelial cells such as sebocytes, hair follicles, hepatocytes, type II pneumocytes, mucin-producing goblet cells, and other epithelial cells and their progenitors contained within the skin, lung, liver, and gastrointestinal tract. Polynucleotides or polypeptides, agonists or antagonists of the present invention, may promote proliferation of endothelial cells, keratinocytes, and basal keratinocytes.

[0711] Polynucleotides or polypeptides, as well as agonists or antagonists of the present invention, could also be used to reduce the side effects of gut toxicity that result from radiation, chemotherapy treatments or viral infections. Polynucleotides or polypeptides, as well as agonists or antagonists of the present invention, may have a cytoprotective effect on the small intestine mucosa. Polynucleotides or polypeptides, as well as agonists or antagonists of the present invention, may also stimulate healing of mucositis (mouth ulcers) that result from chemotherapy and viral infections.

[0712] Polynucleotides or polypeptides, as well as agonists or antagonists of the present invention, could further be used in full regeneration of skin in full and partial thickness skin defects, including burns, (i.e., repopulation of hair follicles, sweat glands, and sebaceous glands), treatment of other skin defects such as psoriasis. Polynucleotides or polypeptides, as well as agonists or antagonists of the present invention, could be used to treat epidermolysis bullosa, a defect in adherence of the epidermis to the underlying dermis which results in frequent, open and painful blisters by accelerating reepithelialization of these lesions. Polynucleotides or polypeptides, as well as agonists or antagonists of the present invention, could also be used to treat gastric and doudenal ulcers and help heal by scar formation of the mucosal lining and regeneration of glandular mucosa and duodenal mucosal lining more rapidly. Inflammatory bowel diseases, such as Crohn's disease and ulcerative colitis, are diseases which result in destruction of the mucosal surface of the small or large intestine, respectively. Thus, polynucleotides or polypeptides, as well as agonists or antagonists of the present invention, could be used to promote the resurfacing of the mucosal surface to aid more rapid healing and to prevent progression of inflammatory bowel disease. Treatment with polynucleotides or polypeptides, agonists or antagonists of the present invention, is expected to have a significant effect on the production of mucus throughout the gastrointestinal tract and could be used to protect the intestinal mucosa from injurious substances that are ingested or following surgery. Polynucleotides or polypeptides, as well as agonists or antagonists of the present invention, could be used to treat diseases associate with the under expression.

[0713] Moreover, polynucleotides or polypeptides, as well as agonists or antagonists of the present invention, could be used to prevent and heal damage to the lungs due to various pathological states. Polynucleotides or polypeptides, as well as agonists or antagonists of the present invention, which could stimulate proliferation and differentiation and promote the repair of alveoli and brochiolar epithelium to prevent or treat acute or chronic lung damage. For example, emphysema, which results in the progressive loss of aveoli, and inhalation injuries, i.e., resulting from smoke inhalation and burns, that cause necrosis of the bronchiolar epithelium and alveoli could be effectively treated using polynucleotides or polypeptides, agonists or antagonists of the present invention. Also, polynucleotides or polypeptides, as well as agonists or antagonists of the present invention, could be used to stimulate the proliferation of and differentiation of type II pneumocytes, which may help treat or prevent disease such as hyaline membrane diseases, such as infant respiratory distress syndrome and bronchopulmonary displasia, in premature infants.

[0714] Polynucleotides or polypeptides, as well as agonists or antagonists of the present invention, could stimulate the proliferation and differentiation of hepatocytes and, thus, could be used to alleviate or treat liver diseases and pathologies such as fulminant liver failure caused by cirrhosis, liver damage caused by viral hepatitis and toxic substances (i.e., acetaminophen, carbon tetraholoride and other hepatotoxins known in the art).

[0715] In addition, polynucleotides or polypeptides, as well as agonists or antagonists of the present invention, could be used treat or prevent the onset of diabetes mellitus. In patients with newly diagnosed Types I and II diabetes, where some islet cell function remains, polynucleotides or polypeptides, as well as agonists or antagonists of the present invention, could be used to maintain the islet function so as to alleviate, delay or prevent permanent manifestation of the disease. Also, polynucleotides or polypeptides, as well as agonists or antagonists of the present invention, could be used as an auxiliary in islet cell transplantation to improve or promote islet cell function.

[0716] Neural Activity and Neurological Diseases

[0717] The polynucleotides, polypeptides and agonists or antagonists of the invention may be used for the diagnosis and/or treatment of diseases, disorders, damage or injury of the brain and/or nervous system. Nervous system disorders that can be treated with the compositions of the invention (e.g., polypeptides, polynucleotides, and/or agonists or antagonists), include, but are not limited to, nervous system injuries, and diseases or disorders which result in either a disconnection of axons, a diminution or degeneration of neurons, or demyelination. Nervous system lesions which may be treated in a patient (including human and non-human mammalian patients) according to the methods of the invention, include but are not limited to, the following lesions of either the central (including spinal cord, brain) or peripheral nervous systems: (1) ischemic lesions, in which a lack of oxygen in a portion of the nervous system results in neuronal injury or death, including cerebral infarction or ischemia, or spinal cord infarction or ischemia; (2) traumatic lesions, including lesions caused by physical injury or associated with surgery, for example, lesions which sever a portion of the nervous system, or compression injuries; (3) malignant lesions, in which a portion of the nervous system is destroyed or injured by malignant tissue which is either a nervous system associated malignancy or a malignancy derived from non-nervous system tissue; (4) infectious lesions, in which a portion of the nervous system is destroyed or injured as a result of infection, for example, by an abscess or associated with infection by human immunodeficiency virus, herpes zoster, or herpes simplex virus or with Lyme disease, tuberculosis, or syphilis; (5) degenerative lesions, in which a portion of the nervous system is destroyed or injured as a result of a degenerative process including but not limited to, degeneration associated with Parkinson's disease, Alzheimer's disease, Huntington's chorea, or amyotrophic lateral sclerosis (ALS); (6) lesions associated with nutritional diseases or disorders, in which a portion of the nervous system is destroyed or injured by a nutritional disorder or disorder of metabolism including, but not limited to, vitamin B 12 deficiency, folic acid deficiency, Wernicke disease, tobacco-alcohol amblyopia, Marchiafava-Bignami disease (primary degeneration of the corpus callosum), and alcoholic cerebellar degeneration; (7) neurological lesions associated with systemic diseases including, but not limited to, diabetes (diabetic neuropathy, Bell's palsy), systemic lupus erythematosus, carcinoma, or sarcoidosis; (8) lesions caused by toxic substances including alcohol, lead, or particular neurotoxins; and (9) demyelinated lesions in which a portion of the nervous system is destroyed or injured by a demyelinating disease including, but not limited to, multiple sclerosis, human immunodeficiency virus-associated myelopathy, transverse myelopathy or various etiologies, progressive multifocal leukoencephalopathy, and central pontine myelinolysis.

[0718] In one embodiment, the polypeptides, polynucleotides, or agonists or antagonists of the invention are used to protect neural cells from the damaging effects of hypoxia. In a further preferred embodiment, the polypeptides, polynucleotides, or agonists or antagonists of the invention are used to protect neural cells from the damaging effects of cerebral hypoxia. According to this embodiment, the compositions of the invention are used to treat or prevent neural cell injury associated with cerebral hypoxia. In one non-exclusive aspect of this embodiment, the polypeptides, polynucleotides, or agonists or antagonists of the invention, are used to treat or prevent neural cell injury associated with cerebral ischemia. In another non-exclusive aspect of this embodiment, the polypeptides, polynucleotides, or agonists or antagonists of the invention are used to treat or prevent neural cell injury associated with cerebral infarction.

[0719] In another preferred embodiment, the polypeptides, polynucleotides, or agonists or antagonists of the invention are used to treat or prevent neural cell injury associated with a stroke. In a specific embodiment, the polypeptides, polynucleotides, or agonists or antagonists of the invention are used to treat or prevent cerebral neural cell injury associated with a stroke.

[0720] In another preferred embodiment, the polypeptides, polynucleotides, or agonists or antagonists of the invention are used to treat or prevent neural cell injury associated with a heart attack. In a specific embodiment, the polypeptides, polynucleotides, or agonists or antagonists of the invention are used to treat or prevent cerebral neural cell injury associated with a heart attack.

[0721] The compositions of the invention which are useful for treating or preventing a nervous system disorder may be selected by testing for biological activity in promoting the survival or differentiation of neurons. For example, and not by way of limitation, compositions of the invention which elicit any of the following effects may be useful according to the invention: (1) increased survival time of neurons in culture either in the presence or absence of hypoxia or hypoxic conditions; (2) increased sprouting of neurons in culture or in vivo; (3) increased production of a neuron-associated molecule in culture or in vivo, e.g., choline acetyltransferase or acetylcholinesterase with respect to motor neurons; or (4) decreased symptoms of neuron dysfunction in vivo. Such effects may be measured by any method known in the art. In preferred, non-limiting embodiments, increased survival of neurons may routinely be measured using a method set forth herein or otherwise known in the art, such as, for example, in Zhang et al., Proc Natl Acad Sci USA 97:3637-42 (2000) or in Arakawa et al., J. Neurosci., 10:3507-15 (1990); increased sprouting of neurons may be detected by methods known in the art, such as, for example, the methods set forth in Pestronk et al., Exp. Neurol., 70:65-82 (1980), or Brown et al., Ann. Rev. Neurosci., 4:17-42 (1981); increased production of neuron-associated molecules may be measured by bioassay, enzymatic assay, antibody binding, Northern blot assay, etc., using techniques known in the art and depending on the molecule to be measured; and motor neuron dysfunction may be measured by assessing the physical manifestation of motor neuron disorder, e.g., weakness, motor neuron conduction velocity, or functional disability.

[0722] In specific embodiments, motor neuron disorders that may be treated according to the invention include, but are not limited to, disorders such as infarction, infection, exposure to toxin, trauma, surgical damage, degenerative disease or malignancy that may affect motor neurons as well as other components of the nervous system, as well as disorders that selectively affect neurons such as amyotrophic lateral sclerosis, and including, but not limited to, progressive spinal muscular atrophy, progressive bulbar palsy, primary lateral sclerosis, infantile and juvenile muscular atrophy, progressive bulbar paralysis of childhood (Fazio-Londe syndrome), poliomyelitis and the post polio syndrome, and Hereditary Motorsensory Neuropathy (Charcot-Marie-Tooth Disease).

[0723] Further, polypeptides or polynucleotides of the invention may play a role in neuronal survival; synapse formation; conductance; neural differentiation, etc. Thus, compositions of the invention (including polynucleotides, polypeptides, and agonists or antagonists) may be used to diagnose and/or treat or prevent diseases or disorders associated with these roles, including, but not limited to, learning and/or cognition disorders. The compositions of the invention may also be useful in the treatment or prevention of neurodegenerative disease states and/or behavioural disorders. Such neurodegenerative disease states and/or behavioral disorders include, but are not limited to, Alzheimer's Disease, Parkinson's Disease, Huntington's Disease, Tourette Syndrome, schizophrenia, mania, dementia, paranoia, obsessive compulsive disorder, panic disorder, learning disabilities, ALS, psychoses, autism, and altered behaviors, including disorders in feeding, sleep patterns, balance, and perception. In addition, compositions of the invention may also play a role in the treatment, prevention and/or detection of developmental disorders associated with the developing embryo, or sexually-linked disorders.

[0724] Additionally, polypeptides, polynucleotides and/or agonists or antagonists of the invention, may be useful in protecting neural cells from diseases, damage, disorders, or injury, associated with cerebrovascular disorders including, but not limited to, carotid artery diseases (e.g., carotid artery thrombosis, carotid stenosis, or Moyamoya Disease), cerebral amyloid angiopathy, cerebral aneurysm, cerebral anoxia, cerebral arteriosclerosis, cerebral arteriovenous malformations, cerebral artery diseases, cerebral embolism and thrombosis (e.g., carotid artery thrombosis, sinus thrombosis, or Wallenberg's Syndrome), cerebral hemorrhage (e.g., epidural or subdural hematoma, or subarachnoid hemorrhage), cerebral infarction, cerebral ischemia (e.g., transient cerebral ischemia, Subclavian Steal Syndrome, or vertebrobasilar insufficiency), vascular dementia (e.g., multi-infarct), leukomalacia, periventricular, and vascular headache (e.g., cluster headache or migraines).

[0725] In accordance with yet a further aspect of the present invention, there is provided a process for utilizing polynucleotides or polypeptides, as well as agonists or antagonists of the present invention, for therapeutic purposes, for example, to stimulate neurological cell proliferation and/or differentiation. Therefore, polynucleotides, polypeptides, agonists and/or antagonists of the invention may be used to treat and/or detect neurologic diseases. Moreover, polynucleotides or polypeptides, or agonists or antagonists of the invention, can be used as a marker or detector of a particular nervous system disease or disorder.

[0726] Examples of neurologic diseases which can be treated or detected with polynucleotides, polypeptides, agonists, and/or antagonists of the present invention include brain diseases, such as metabolic brain diseases which includes phenylketonuria such as maternal phenylketonuria, pyruvate carboxylase deficiency, pyruvate dehydrogenase complex deficiency, Wernicke's Encephalopathy, brain edema, brain neoplasms such as cerebellar neoplasms which include infratentorial neoplasms, cerebral ventricle neoplasms such as choroid plexus neoplasms, hypothalamic neoplasms, supratentorial neoplasms, canavan disease, cerebellar diseases such as cerebellar ataxia which include spinocerebellar degeneration such as ataxia telangiectasia, cerebellar dyssynergia, Friederich's Ataxia, Machado-Joseph Disease, olivopontocerebellar atrophy, cerebellar neoplasms such as infratentorial neoplasms, diffuse cerebral sclerosis such as encephalitis periaxialis, globoid cell leukodystrophy, metachromatic leukodystrophy and subacute sclerosing panencephalitis.

[0727] Additional neurologic diseases which can be treated or detected with polynucleotides, polypeptides, agonists, and/or antagonists of the present invention include cerebrovascular disorders (such as carotid artery diseases which include carotid artery thrombosis, carotid stenosis and Moyamoya Disease), cerebral amyloid angiopathy, cerebral aneurysm, cerebral anoxia, cerebral arteriosclerosis, cerebral arteriovenous malformations, cerebral artery diseases, cerebral embolism and thrombosis such as carotid artery thrombosis, sinus thrombosis and Wallenberg's Syndrome, cerebral hemorrhage such as epidural hematoma, subdural hematoma and subarachnoid hemorrhage, cerebral infarction, cerebral ischemia such as transient cerebral ischemia, Subclavian Steal Syndrome and vertebrobasilar insufficiency, vascular dementia such as multi-infarct dementia, periventricular leukomalacia, vascular headache such as cluster headache and migraine.

[0728] Additional neurologic diseases which can be treated or detected with polynucleotides, polypeptides, agonists, and/or antagonists of the present invention include dementia such as AIDS Dementia Complex, presenile dementia such as Alzheimer's Disease and Creutzfeldt-Jakob Syndrome, senile dementia such as Alzheimer's Disease and progressive supranuclear palsy, vascular dementia such as multi-infarct dementia, encephalitis which include encephalitis periaxialis, viral encephalitis such as epidemic encephalitis, Japanese Encephalitis, St. Louis Encephalitis, tick-borne encephalitis and West Nile Fever, acute disseminated encephalomyelitis, meningoencephalitis such as uveomeningoencephalitic syndrome, Postencephalitic Parkinson Disease and subacute sclerosing panencephalitis, encephalomalacia such as periventricular leukomalacia, epilepsy such as generalized epilepsy which includes infantile spasms, absence epilepsy, myoclonic epilepsy which includes MERRF Syndrome, tonic-clonic epilepsy, partial epilepsy such as complex partial epilepsy, frontal lobe epilepsy and temporal lobe epilepsy, post-traumatic epilepsy, status epilepticus such as Epilepsia Partialis Continua, and Hallervorden-Spatz Syndrome.

[0729] Additional neurologic diseases which can be treated or detected with polynucleotides, polypeptides, agonists, and/or antagonists of the present invention include hydrocephalus such as Dandy-Walker Syndrome and normal pressure hydrocephalus, hypothalamic diseases such as hypothalamic neoplasms, cerebral malaria, narcolepsy which includes cataplexy, bulbar poliomyelitis, cerebri pseudotumor, Rett Syndrome, Reye's Syndrome, thalamic diseases, cerebral toxoplasmosis, intracranial tuberculoma and Zellweger Syndrome, central nervous system infections such as AIDS Dementia Complex, Brain Abscess, subdural empyema, encephalomyelitis such as Equine Encephalomyelitis, Venezuelan Equine Encephalomyelitis, Necrotizing Hemorrhagic Encephalomyelitis, Visna, and cerebral malaria.

[0730] Additional neurologic diseases which can be treated or detected with polynucleotides, polypeptides, agonists, and/or antagonists of the present invention include meningitis such as arachnoiditis, aseptic meningtitis such as viral meningtitis which includes lymphocytic choriomeningitis, Bacterial meningtitis which includes Haemophilus Meningtitis, Listeria Meningtitis, Meningococcal Meningtitis such as Waterhouse-Friderichsen Syndrome, Pneumococcal Meningtitis and meningeal tuberculosis, fungal meningitis such as Cryptococcal Meningtitis, subdural effusion, meningoencephalitis such as uvemeningoencephalitic syndrome, myelitis such as transverse myelitis, neurosyphilis such as tabes dorsalis, poliomyelitis which includes bulbar poliomyelitis and postpoliomyelitis syndrome, prion diseases (such as Creutzfeldt-Jakob Syndrome, Bovine Spongiform Encephalopathy, Gerstmann-Straussler Syndrome, Kuru, Scrapie), and cerebral toxoplasmosis.

[0731] Additional neurologic diseases which can be treated or detected with polynucleotides, polypeptides, agonists, and/or antagonists of the present invention include central nervous system neoplasms such as brain neoplasms that include cerebellar neoplasms such as infratentorial neoplasms, cerebral ventricle neoplasms such as choroid plexus neoplasms, hypothalamic neoplasms and supratentorial neoplasms, meningeal neoplasms, spinal cord neoplasms which include epidural neoplasms, demyelinating diseases such as Canavan Diseases, diffuse cerebral sceloris which includes adrenoleukodystrophy, encephalitis periaxialis, globoid cell leukodystrophy, diffuse cerebral sclerosis such as metachromatic leukodystrophy, allergic encephalomyelitis, necrotizing hemorrhagic encephalomyelitis, progressive multifocal leukoencephalopathy, multiple sclerosis, central pontine myelinolysis, transverse myelitis, neuromyelitis optica, Scrapie, Swayback, Chronic Fatigue Syndrome, Visna, High Pressure Nervous Syndrome, Meningism, spinal cord diseases such as amyotonia congenita, amyotrophic lateral sclerosis, spinal muscular atrophy such as Werdnig-Hoffmann Disease, spinal cord compression, spinal cord neoplasms such as epidural neoplasms, syringomyelia, Tabes Dorsalis, Stiff-Man Syndrome, mental retardation such as Angelman Syndrome, Cri-du-Chat Syndrome, De Lange's Syndrome, Down Syndrome, Gangliosidoses such as gangliosidoses G(M1), Sandhoff Disease, Tay-Sachs Disease, Hartnup Disease, homocystinuria, Laurence-Moon-Biedl Syndrome, Lesch-Nyhan Syndrome, Maple Syrup Urine Disease, mucolipidosis such as fucosidosis, neuronal ceroid-lipofuscinosis, oculocerebrorenal syndrome, phenylketonuria such as maternal phenylketonuria, Prader-Willi Syndrome, Rett Syndrome, Rubinstein-Taybi Syndrome, Tuberous Sclerosis, WAGR Syndrome, nervous system abnormalities such as holoprosencephaly, neural tube defects such as anencephaly which includes hydrangencephaly, Arnold-Chairi Deformity, encephalocele, meningocele, meningomyelocele, spinal dysraphism such as spina bifida cystica and spina bifida occulta.

[0732] Additional neurologic diseases which can be treated or detected with polynucleotides, polypeptides, agonists, and/or antagonists of the present invention include hereditary motor and sensory neuropathies which include Charcot-Marie Disease, Hereditary optic atrophy, Refsum's Disease, hereditary spastic paraplegia, Werdnig-Hoffmann Disease, Hereditary Sensory and Autonomic Neuropathies such as Congenital Analgesia and Familial Dysautonomia, Neurologic manifestations (such as agnosia that include Gerstmann's Syndrome, Amnesia such as retrograde amnesia, apraxia, neurogenic bladder, cataplexy, communicative disorders such as hearing disorders that includes deafness, partial hearing loss, loudness recruitment and tinnitus, language disorders such as aphasia which include agraphia, anomia, broca aphasia, and Wernicke Aphasia, Dyslexia such as Acquired Dyslexia, language development disorders, speech disorders such as aphasia which includes anomia, broca aphasia and Wernicke Aphasia, articulation disorders, communicative disorders such as speech disorders which include dysarthria, echolalia, mutism and stuttering, voice disorders such as aphonia and hoarseness, decerebrate state, delirium, fasciculation, hallucinations, meningism, movement disorders such as angelman syndrome, ataxia, athetosis, chorea, dystonia, hypokinesia, muscle hypotonia, myoclonus, tic, torticollis and tremor, muscle hypertonia such as muscle rigidity such as stiff-man syndrome, muscle spasticity, paralysis such as facial paralysis which includes Herpes Zoster Oticus, Gastroparesis, Hemiplegia, ophthalmoplegia such as diplopia, Duane's Syndrome, Horner's Syndrome, Chronic progressive external ophthalmoplegia such as Kearns Syndrome, Bulbar Paralysis, Tropical Spastic Paraparesis, Paraplegia such as Brown-Sequard Syndrome, quadriplegia, respiratory paralysis and vocal cord paralysis, paresis, phantom limb, taste disorders such as ageusia and dysgeusia, vision disorders such as amblyopia, blindness, color vision defects, diplopia, hemianopsia, scotoma and subnormal vision, sleep disorders such as hypersomnia which includes Kleine-Levin Syndrome, insomnia, and somnambulism, spasm such as trismus, unconsciousness such as coma, persistent vegetative state and syncope and vertigo, neuromuscular diseases such as amyotonia congenita, amyotrophic lateral sclerosis, Lambert-Eaton Myasthenic Syndrome, motor neuron disease, muscular atrophy such as spinal muscular atrophy, Charcot-Marie Disease and Werdnig-Hoffmann Disease, Postpoliomyelitis Syndrome, Muscular Dystrophy, Myasthenia Gravis, Myotonia Atrophica, Myotonia Confenita, Nemaline Myopathy, Familial Periodic Paralysis, Multiplex Paramyloclonus, Tropical Spastic Paraparesis and Stiff-Man Syndrome, peripheral nervous system diseases such as acrodynia, amyloid neuropathies, autonomic nervous system diseases such as Adie's Syndrome, Barre-Lieou Syndrome, Familial Dysautonomia, Horner's Syndrome, Reflex Sympathetic Dystrophy and Shy-Drager Syndrome, Cranial Nerve Diseases such as Acoustic Nerve Diseases such as Acoustic Neuroma which includes Neurofibromatosis 2, Facial Nerve Diseases such as Facial Neuralgia,Melkersson-Rosenthal Syndrome, ocular motility disorders which includes amblyopia, nystagmus, oculomotor nerve paralysis, ophthalmoplegia such as Duane's Syndrome, Horner's Syndrome, Chronic Progressive External Ophthalmoplegia which includes Kearns Syndrome, Strabismus such as Esotropia and Exotropia, Oculomotor Nerve Paralysis, Optic Nerve Diseases such as Optic Atrophy which includes Hereditary Optic Atrophy, Optic Disk Drusen, Optic Neuritis such as Neuromyelitis Optica, Papilledema, Trigeminal Neuralgia, Vocal Cord Paralysis, Demyelinating Diseases such as Neuromyelitis Optica and Swayback, and Diabetic neuropathies such as diabetic foot.

[0733] Additional neurologic diseases which can be treated or detected with polynucleotides, polypeptides, agonists, and/or antagonists of the present invention include nerve compression syndromes such as carpal tunnel syndrome, tarsal tunnel syndrome, thoracic outlet syndrome such as cervical rib syndrome, ulnar nerve compression syndrome, neuralgia such as causalgia, cervico-brachial neuralgia, facial neuralgia and trigeminal neuralgia, neuritis such as experimental allergic neuritis, optic neuritis, polyneuritis, polyradiculoneuritis and radiculities such as polyradiculitis, hereditary motor and sensory neuropathies such as Charcot-Marie Disease, Hereditary Optic Atrophy, Refsum's Disease, Hereditary Spastic Paraplegia and Werdnig-Hoffmann Disease, Hereditary Sensory and Autonomic Neuropathies which include Congenital Analgesia and Familial Dysautonomia, POEMS Syndrome, Sciatica, Gustatory Sweating and Tetany).

[0734] Endocrine Disorders

[0735] Polynucleotides or polypeptides, or agonists or antagonists of the present invention, may be used to treat, prevent, diagnose, and/or prognose disorders and/or diseases related to hormone imbalance, and/or disorders or diseases of the endocrine system.

[0736] Hormones secreted by the glands of the endocrine system control physical growth, sexual function, metabolism, and other functions. Disorders may be classified in two ways: disturbances in the production of hormones, and the inability of tissues to respond to hormones. The etiology of these hormone imbalance or endocrine system diseases, disorders or conditions may be genetic, somatic, such as cancer and some autoimmune diseases, acquired (e.g., by chemotherapy, injury or toxins), or infectious. Moreover, polynucleotides, polypeptides, antibodies, and/or agonists or antagonists of the present invention can be used as a marker or detector of a particular disease or disorder related to the endocrine system and/or hormone imbalance.

[0737] Endocrine system and/or hormone imbalance and/or diseases encompass disorders of uterine motility including, but not limited to: complications with pregnancy and labor (e.g., pre-term labor, post-term pregnancy, spontaneous abortion, and slow or stopped labor); and disorders and/or diseases of the menstrual cycle (e.g., dysmenorrhea and endometriosis).

[0738] Endocrine system and/or hormone imbalance disorders and/or diseases include disorders and/or diseases of the pancreas, such as, for example, diabetes mellitus, diabetes insipidus, congenital pancreatic agenesis, pheochromocytoma—islet cell tumor syndrome; disorders and/or diseases of the adrenal glands such as, for example, Addison's Disease, corticosteroid deficiency, virilizing disease, hirsutism, Cushing's Syndrome, hyperaldosteronism, pheochromocytoma; disorders and/or diseases of the pituitary gland, such as, for example, hyperpituitarism, hypopituitarism, pituitary dwarfism, pituitary adenoma, panhypopituitarism, acromegaly, gigantism; disorders and/or diseases of the thyroid, including but not limited to, hyperthyroidism, hypothyroidism, Plummer's disease, Graves' disease (toxic diffuse goiter), toxic nodular goiter, thyroiditis (Hashimoto's thyroiditis, subacute granulomatous thyroiditis, and silent lymphocytic thyroiditis), Pendred's syndrome, myxedema, cretinism, thyrotoxicosis, thyroid hormone coupling defect, thymic aplasia, Hurthle cell tumours of the thyroid, thyroid cancer, thyroid carcinoma, Medullary thyroid carcinoma; disorders and/or diseases of the parathyroid, such as, for example, hyperparathyroidism, hypoparathyroidism; disorders and/or diseases of the hypothalamus.

[0739] In addition, endocrine system and/or hormone imbalance disorders and/or diseases may also include disorders and/or diseases of the testes or ovaries, including cancer. Other disorders and/or diseases of the testes or ovaries further include, for example, ovarian cancer, polycystic ovary syndrome, Klinefelter's syndrome, vanishing testes syndrome (bilateral anorchia), congenital absence of Leydig's cells, cryptorchidism, Noonan's syndrome, myotonic dystrophy, capillary haemangioma of the testis (benign), neoplasias of the testis and neo-testis.

[0740] Moreover, endocrine system and/or hormone imbalance disorders and/or diseases may also include disorders and/or diseases such as, for example, polyglandular deficiency syndromes, pheochromocytoma, neuroblastoma, multiple Endocrine neoplasia, and disorders and/or cancers of endocrine tissues.

[0741] In another embodiment, a polypeptide of the invention, or polynucleotides, antibodies, agonists, or antagonists corresponding to that polypeptide, may be used to diagnose, prognose, prevent, and/or treat endocrine diseases and/or disorders associated with the tissue(s) in which the polypeptide of the invention is expressed, including one, two, three, four, five, or more tissues disclosed in Table 1A, column 8 (Tissue Distribution Library Code).

[0742] Reproductive System Disorders

[0743] The polynucleotides or polypeptides, or agonists or antagonists of the invention may be used for the diagnosis, treatment, or prevention of diseases and/or disorders of the reproductive system. Reproductive system disorders that can be treated by the compositions of the invention, include, but are not limited to, reproductive system injuries, infections, neoplastic disorders, congenital defects, and diseases or disorders which result in infertility, complications with pregnancy, labor, or parturition, and postpartum difficulties.

[0744] Reproductive system disorders and/or diseases include diseases and/or disorders of the testes, including testicular atrophy, testicular feminization, cryptorchism (unilateral and bilateral), anorchia, ectopic testis, epididymitis and orchitis (typically resulting from infections such as, for example, gonorrhea, mumps, tuberculosis, and syphilis), testicular torsion, vasitis nodosa, germ cell tumors (e.g., seminomas, embryonal cell carcinomas, teratocarcinomas, choriocarcinomas, yolk sac tumors, and teratomas), stromal tumors (e.g., Leydig cell tumors), hydrocele, hematocele, varicocele, spermatocele, inguinal hernia, and disorders of sperm production (e.g., immotile cilia syndrome, aspermia, asthenozoospermia, azoospermia, oligospermia, and teratozoospermia).

[0745] Reproductive system disorders also include disorders of the prostate gland, such as acute non-bacterial prostatitis, chronic non-bacterial prostatitis, acute bacterial prostatitis, chronic bacterial prostatitis, prostatodystonia, prostatosis, granulomatous prostatitis, malacoplakia, benign prostatic hypertrophy or hyperplasia, and prostate neoplastic disorders, including adenocarcinomas, transitional cell carcinomas, ductal carcinomas, and squamous cell carcinomas.

[0746] Additionally, the compositions of the invention may be useful in the diagnosis, treatment, and/or prevention of disorders or diseases of the penis and urethra, including inflammatory disorders, such as balanoposthitis, balanitis xerotica obliterans, phimosis, paraphimosis, syphilis, herpes simplex virus, gonorrhea, non-gonococcal urethritis, chlamydia, mycoplasma, trichomonas, HIV, AIDS, Reiter's syndrome, condyloma acuminatum, condyloma latum, and pearly penile papules; urethral abnormalities, such as hypospadias, epispadias, and phimosis; premalignant lesions, including Erythroplasia of Queyrat, Bowen's disease, Bowenoid paplosis, giant condyloma of Buscke-Lowenstein, and varrucous carcinoma; penile cancers, including squamous cell carcinomas, carcinoma in situ, verrucous carcinoma, and disseminated penile carcinoma; urethral neoplastic disorders, including penile urethral carcinoma, bulbomembranous urethral carcinoma, and prostatic urethral carcinoma; and erectile disorders, such as priapism, Peyronie's disease, erectile dysfunction, and impotence.

[0747] Moreover, diseases and/or disorders of the vas deferens include vasculititis and CBAVD (congenital bilateral absence of the vas deferens); additionally, the polynucleotides, polypeptides, and agonists or antagonists of the present invention may be used in the diagnosis, treatment, and/or prevention of diseases and/or disorders of the seminal vesicles, including hydatid disease, congenital chloride diarrhea, and polycystic kidney disease.

[0748] Other disorders and/or diseases of the male reproductive system include, for example, Klinefelter's syndrome, Young's syndrome, premature ejaculation, diabetes mellitus, cystic fibrosis, Kartagener's syndrome, high fever, multiple sclerosis, and gynecomastia.

[0749] Further, the polynucleotides, polypeptides, and agonists or antagonists of the present invention may be used in the diagnosis, treatment, and/or prevention of diseases and/or disorders of the vagina and vulva, including bacterial vaginosis, candida vaginitis, herpes simplex virus, chancroid, granuloma inguinale, lymphogranuloma venereum, scabies, human papillomavirus, vaginal trauma, vulvar trauma, adenosis, chlamydia vaginitis, gonorrhea, trichomonas vaginitis, condyloma acuminatum, syphilis, molluscum contagiosum, atrophic vaginitis, Paget's disease, lichen sclerosus, lichen planus, vulvodynia, toxic shock syndrome, vaginismus, vulvovaginitis, vulvar vestibulitis, and neoplastic disorders, such as squamous cell hyperplasia, clear cell carcinoma, basal cell carcinoma, melanomas, cancer of Bartholin's gland, and vulvar intraepithelial neoplasia.

[0750] Disorders and/or diseases of the uterus include dysmenorrhea, retroverted uterus, endometriosis, fibroids, adenomyosis, anovulatory bleeding, amenorrhea, Cushing's syndrome, hydatidiform moles, Asherman's syndrome, premature menopause, precocious puberty, uterine polyps, dysfunctional uterine bleeding (e.g., due to aberrant hormonal signals), and neoplastic disorders, such as adenocarcinomas, keiomyosarcomas, and sarcomas. Additionally, the polypeptides, polynucleotides, or agonists or antagonists of the invention may be useful as a marker or detector of, as well as in the diagnosis, treatment, and/or prevention of congenital uterine abnormalities, such as bicornuate uterus, septate uterus, simple unicornuate uterus, unicornuate uterus with a noncavitary rudimentary horn, unicornuate uterus with a non-communicating cavitary rudimentary horn, unicornuate uterus with a communicating cavitary horn, arcuate uterus, uterine didelfus, and T-shaped uterus.

[0751] Ovarian diseases and/or disorders include anovulation, polycystic ovary syndrome (Stein-Leventhal syndrome), ovarian cysts, ovarian hypofunction, ovarian insensitivity to gonadotropins, ovarian overproduction of androgens, right ovarian vein syndrome, amenorrhea, hirutism, and ovarian cancer (including, but not limited to, primary and secondary cancerous growth, Sertoli-Leydig tumors, endometriod carcinoma of the ovary, ovarian papillary serous adenocarcinoma, ovarian mucinous adenocarcinoma, and Ovarian Krukenberg tumors).

[0752] Cervical diseases and/or disorders include cervicitis, chronic cervicitis, mucopurulent cervicitis, cervical dysplasia, cervical polyps, Nabothian cysts, cervical erosion, cervical incompetence, and cervical neoplasms (including, for example, cervical carcinoma, squamous metaplasia, squamous cell carcinoma, adenosquamous cell neoplasia, and columnar cell neoplasia).

[0753] Additionally, diseases and/or disorders of the reproductive system include disorders and/or diseases of pregnancy, including miscarriage and stillbirth, such as early abortion, late abortion, spontaneous abortion, induced abortion, therapeutic abortion, threatened abortion, missed abortion, incomplete abortion, complete abortion, habitual abortion, missed abortion, and septic abortion; ectopic pregnancy, anemia, Rh incompatibility, vaginal bleeding during pregnancy, gestational diabetes, intrauterine growth retardation, polyhydramnios, HELLP syndrome, abruptio placentae, placenta previa, hyperemesis, preeclampsia, eclampsia, herpes gestationis, and urticaria of pregnancy. Additionally, the polynucleotides, polypeptides, and agonists or antagonists of the present invention may be used in the diagnosis, treatment, and/or prevention of diseases that can complicate pregnancy, including heart disease, heart failure, rheumatic heart disease, congenital heart disease, mitral valve prolapse, high blood pressure, anemia, kidney disease, infectious disease (e.g., rubella, cytomegalovirus, toxoplasmosis, infectious hepatitis, chlamydia, HIV, AIDS, and genital herpes), diabetes mellitus, Graves' disease, thyroiditis, hypothyroidism, Hashimoto's thyroiditis, chronic active hepatitis, cirrhosis of the liver, primary biliary cirrhosis, asthma, systemic lupus eryematosis, rheumatoid arthritis, myasthenia gravis, idiopathic thrombocytopenic purpura, appendicitis, ovarian cysts, gallbladder disorders,and obstruction of the intestine.

[0754] Complications associated with labor and parturition include premature rupture of the membranes, pre-term labor, post-term pregnancy, postmaturity, labor that progresses too slowly, fetal distress (e.g., abnormal heart rate (fetal or maternal), breathing problems, and abnormal fetal position), shoulder dystocia, prolapsed umbilical cord, amniotic fluid embolism, and aberrant uterine bleeding.

[0755] Further, diseases and/or disorders of the postdelivery period, including endometritis, myometritis, parametritis, peritonitis, pelvic thrombophlebitis, pulmonary embolism, endotoxemia, pyelonephritis, saphenous thrombophlebitis, mastitis, cystitis, postpartum hemorrhage, and inverted uterus.

[0756] Other disorders and/or diseases of the female reproductive system that may be diagnosed, treated, and/or prevented by the polynucleotides, polypeptides, and agonists or antagonists of the present invention include, for example, Turner's syndrome, pseudohermaphroditism, premenstrual syndrome, pelvic inflammatory disease, pelvic congestion (vascular engorgement), frigidity, anorgasmia, dyspareunia, ruptured fallopian tube, and Mittelschmerz.

[0757] Infectious Disease

[0758] Polynucleotides or polypeptides, as well as agonists or antagonists of the present invention can be used to treat or detect infectious agents. For example, by increasing the immune response, particularly increasing the proliferation and differentiation of B and/or T cells, infectious diseases may be treated. The immune response may be increased by either enhancing an existing immune response, or by initiating a new immune response. Alternatively, polynucleotides or polypeptides, as well as agonists or antagonists of the present invention may also directly inhibit the infectious agent, without necessarily eliciting an immune response.

[0759] Viruses are one example of an infectious agent that can cause disease or symptoms that can be treated or detected by a polynucleotide or polypeptide and/or agonist or antagonist of the present invention. Examples of viruses, include, but are not limited to Examples of viruses, include, but are not limited to the following DNA and RNA viruses and viral families: Arbovirus, Adenoviridae, Arenaviridae, Arterivirus, Birnaviridae, Bunyaviridae, Caliciviridae, Circoviridae, Coronaviridae, Dengue, EBV, HIV, Flaviviridae, Hepadnaviridae (Hepatitis), Herpesviridae (such as, Cytomegalovirus, Herpes Simplex, Herpes Zoster), Mononegavirus (e.g., Paramyxoviridae, Morbillivirus, Rhabdoviridae), Orthomyxoviridae (e.g., Influenza A, Influenza B, and parainfluenza), Papiloma virus, Papovaviridae, Parvoviridae, Picornaviridae, Poxviridae (such as Smallpox or Vaccinia), Reoviridae (e.g., Rotavirus), Retroviridae (HTLV-I, HTLV-II, Lentivirus), and Togaviridae (e.g., Rubivirus). Viruses falling within these families can cause a variety of diseases or symptoms, including, but not limited to: arthritis, bronchiollitis, respiratory syncytial virus, encephalitis, eye infections (e.g., conjunctivitis, keratitis), chronic fatigue syndrome, hepatitis (A, B, C, E, Chronic Active, Delta), Japanese B encephalitis, Junin, Chikungunya, Rift Valley fever, yellow fever, meningitis, opportunistic infections (e.g., AIDS), pneumonia, Burkitt's Lymphoma, chickenpox, hemorrhagic fever, Measles, Mumps, Parainfluenza, Rabies, the common cold, Polio, leukemia, Rubella, sexually transmitted diseases, skin diseases (e.g., Kaposi's, warts), and viremia. polynucleotides or polypeptides, or agonists or antagonists of the invention, can be used to treat or detect any of these symptoms or diseases. In specific embodiments, polynucleotides, polypeptides, or agonists or antagonists of the invention are used to treat: meningitis, Dengue, EBV, and/or hepatitis (e.g., hepatitis B). In an additional specific embodiment polynucleotides, polypeptides, or agonists or antagonists of the invention are used to treat patients nonresponsive to one or more other commercially available hepatitis vaccines. In a further specific embodiment polynucleotides, polypeptides, or agonists or antagonists of the invention are used to treat AIDS.

[0760] Similarly, bacterial and fingal agents that can cause disease or symptoms and that can be treated or detected by a polynucleotide or polypeptide and/or agonist or antagonist of the present invention include, but not limited to, the following Gram-Negative and Gram-positive bacteria, bacterial families, and fungi: Actinomyces (e.g., Norcardia), Acinetobacter, Cryptococcus neoformans, Aspergillus, Bacillaceae (e.g., Bacillus anthrasis), Bacteroides (e.g., Bacteroides fragilis), Blastomycosis, Bordetella, Borrelia (e.g., Borrelia burgdorferi), Brucella, Candidia, Campylobacter, Chlamydia, Clostridium (e.g., Clostridium botulinum, Clostridium dificile, Clostridium perfringens, Clostridium tetani), Coccidioides, Corynebacterium (e.g., Corynebacterium diptheriae), Cryptococcus, Dermatocycoses, E. coli (e.g., Enterotoxigenic E. coli and Enterohemorrhagic E. coli), Enterobacter (e.g. Enterobacter aerogenes), Enterobacteriaceae (Klebsiella, Salmonella (e.g., Salmonella typhi, Salmonella enteritidis, Salmonella typhi), Serratia, Yersinia, Shigella), Erysipelothrix, Haemophilus (e.g., Haemophilus influenza type B), Helicobacter, Legionella (e.g., Legionella pneumophila), Leptospira, Listeria (e.g., Listeria monocytogenes), Mycoplasma, Mycobacterium (e.g., Mycobacterium leprae and Mycobacterium tuberculosis), Vibrio (e.g., Vibrio cholerae), Neisseriaceae (e.g., Neisseria gonorrhea, Neisseria meningitidis), Pasteurellacea, Proteus, Pseudomonas (e.g., Pseudomonas aeruginosa), Rickettsiaceae, Spirochetes (e.g., Treponema spp., Leptospira spp., Borrelia spp.), Shigella spp., Staphylococcus (e.g., Staphylococcus aureus), Meningiococcus, Pneumococcus and Streptococcus (e.g., Streptococcus pneumoniae and Groups A, B, and C Streptococci), and Ureaplasmas. These bacterial, parasitic, and fungal families can cause diseases or symptoms, including, but not limited to: antibiotic-resistant infections, bacteremia, endocarditis, septicemia, eye infections (e.g., conjunctivitis), uveitis, tuberculosis, gingivitis, bacterial diarrhea, opportunistic infections (e.g., AIDS related infections), paronychia, prosthesis-related infections, dental caries, Reiter's Disease, respiratory tract infections, such as Whooping Cough or Empyema, sepsis, Lyme Disease, Cat-Scratch Disease, dysentery, paratyphoid fever, food poisoning, Legionella disease, chronic and acute inflammation, erythema, yeast infections, typhoid, pneumonia, gonorrhea, meningitis (e.g., mengitis types A and B), chlamydia, syphillis, diphtheria, leprosy, brucellosis, peptic ulcers, anthrax, spontaneous abortions, birth defects, pneumonia, lung infections, ear infections, deafness, blindness, lethargy, malaise, vomiting, chronic diarrhea, Crohn's disease, colitis, vaginosis, sterility, pelvic inflammatory diseases, candidiasis, paratuberculosis, tuberculosis, lupus, botulism, gangrene, tetanus, impetigo, Rheumatic Fever, Scarlet Fever, sexually transmitted diseases, skin diseases (e.g., cellulitis, dermatocycoses), toxemia, urinary tract infections, wound infections, noscomial infections. Polynucleotides or polypeptides, agonists or antagonists of the invention, can be used to treat or detect any of these symptoms or diseases. In specific embodiments, polynucleotides, polypeptides, agonists or antagonists of the invention are used to treat: tetanus, diptheria, botulism, and/or meningitis type B.

[0761] Moreover, parasitic agents causing disease or symptoms that can be treated, prevented, and/or diagnosed by a polynucleotide or polypeptide and/or agonist or antagonist of the present invention include, but not limited to, the following families or class: Amebiasis, Babesiosis, Coccidiosis, Cryptosporidiosis, Dientamoebiasis, Dourine, Ectoparasitic, Giardias, Helminthiasis, Leishmaniasis, Schistisoma, Theileriasis, Toxoplasmosis, Trypanosomiasis, and Trichomonas and Sporozoans (e.g., Plasmodium virax, Plasmodium falciparium, Plasmodium malariae and Plasmodium ovale). These parasites can cause a variety of diseases or symptoms, including, but not limited to: Scabies, Trombiculiasis, eye infections, intestinal disease (e.g., dysentery, giardiasis), liver disease, lung disease, opportunistic infections (e.g., AIDS related), malaria, pregnancy complications, and toxoplasmosis. polynucleotides or polypeptides, or agonists or antagonists of the invention, can be used to treat, prevent, and/or diagnose any of these symptoms or diseases. In specific embodiments, polynucleotides, polypeptides, or agonists or antagonists of the invention are used to treat, prevent, and/or diagnose malaria.

[0762] Polynucleotides or polypeptides, as well as agonists or antagonists of the present invention of the present invention could either be by administering an effective amount of a polypeptide to the patient, or by removing cells from the patient, supplying the cells with a polynucleotide of the present invention, and returning the engineered cells to the patient (ex vivo therapy). Moreover, the polypeptide or polynucleotide of the present invention can be used as an antigen in a vaccine to raise an immune response against infectious disease.

[0763] Regeneration

[0764] Polynucleotides or polypeptides, as well as agonists or antagonists of the present invention can be used to differentiate, proliferate, and attract cells, leading to the regeneration of tissues. (See, Science 276:59-87 (1997)). The regeneration of tissues could be used to repair, replace, or protect tissue damaged by congenital defects, trauma (wounds, burns, incisions, or ulcers), age, disease (e.g. osteoporosis, osteocarthritis, periodontal disease, liver failure), surgery, including cosmetic plastic surgery, fibrosis, reperfusion injury, or systemic cytokine damage.

[0765] Tissues that could be regenerated using the present invention include organs (e.g., pancreas, liver, intestine, kidney, skin, endothelium), muscle (smooth, skeletal or cardiac), vasculature (including vascular and lymphatics), nervous, hematopoietic, and skeletal (bone, cartilage, tendon, and ligament) tissue. Preferably, regeneration occurs without or decreased scarring. Regeneration also may include angiogenesis.

[0766] Moreover, polynucleotides or polypeptides, as well as agonists or antagonists of the present invention, may increase regeneration of tissues difficult to heal. For example, increased tendon/ligament regeneration would quicken recovery time after damage. Polynucleotides or polypeptides, as well as agonists or antagonists of the present invention could also be used prophylactically in an effort to avoid damage. Specific diseases that could be treated include of tendinitis, carpal tunnel syndrome, and other tendon or ligament defects. A further example of tissue regeneration of non-healing wounds includes pressure ulcers, ulcers associated with vascular insufficiency, surgical, and traumatic wounds.

[0767] Similarly, nerve and brain tissue could also be regenerated by using polynucleotides or polypeptides, as well as agonists or antagonists of the present invention, to proliferate and differentiate nerve cells. Diseases that could be treated using this method include central and peripheral nervous system diseases, neuropathies, or mechanical and traumatic disorders (e.g., spinal cord disorders, head trauma, cerebrovascular disease, and stoke). Specifically, diseases associated with peripheral nerve injuries, peripheral neuropathy (e.g., resulting from chemotherapy or other medical therapies), localized neuropathies, and central nervous system diseases (e.g., Alzheimer's disease, Parkinson's disease, Huntington's disease, amyotrophic lateral sclerosis, and Shy-Drager syndrome), could all be treated using the polynucleotides or polypeptides, as well as agonists or antagonists of the present invention.

[0768] Gastrointestinal Disorders

[0769] Polynucleotides or polypeptides, or agonists or antagonists of the present invention, may be used to treat, prevent, diagnose, and/or prognose gastrointestinal disorders, including inflammatory diseases and/or conditions, infections, cancers (e.g., intestinal neoplasms (carcinoid tumor of the small intestine, non-Hodgkin's lymphoma of the small intestine, small bowl lymphoma)), and ulcers, such as peptic ulcers.

[0770] Gastrointestinal disorders include dysphagia, odynophagia, inflammation of the esophagus, peptic esophagitis, gastric reflux, submucosal fibrosis and stricturing, Mallory-Weiss lesions, leiomyomas, lipomas, epidermal cancers, adeoncarcinomas, gastric retention disorders, gastroenteritis, gastric atrophy, gastric/stomach cancers, polyps of the stomach, autoimmune disorders such as pernicious anemia, pyloric stenosis, gastritis (bacterial, viral, eosinophilic, stress-induced, chronic erosive, atrophic, plasma cell, and Menetrier's), and peritoneal diseases (e.g., chyloperioneum, hemoperitoneum, mesenteric cyst, mesenteric lymphadenitis, mesenteric vascular occlusion, panniculitis, neoplasms, peritonitis, pneumoperitoneum, bubphrenic abscess,).

[0771] Gastrointestinal disorders also include disorders associated with the small intestine, such as malabsorption syndromes, distension, irritable bowel syndrome, sugar intolerance, celiac disease, duodenal ulcers, duodenitis, tropical sprue, Whipple's disease, intestinal lymphangiectasia, Crohn's disease, appendicitis, obstructions of the ileum, Meckel's diverticulum, multiple diverticula, failure of complete rotation of the small and large intestine, lymphoma, and bacterial and parasitic diseases (such as Traveler's diarrhea, typhoid and paratyphoid, cholera, infection by Roundworms (Ascariasis lumbricoides), Hookworms (Ancylostoma duodenale), Threadworms (Enterobius vermicularis), Tapeworms (Taenia saginata, Echinococcus granulosus, Diphyllobothrium spp., and T. solium).

[0772] Liver diseases and/or disorders include intrahepatic cholestasis (alagille syndrome, biliary liver cirrhosis), fatty liver (alcoholic fatty liver, reye syndrome), hepatic vein thrombosis, hepatolentricular degeneration, hepatomegaly, hepatopulmonary syndrome, hepatorenal syndrome, portal hypertension (esophageal and gastric varices), liver abscess (amebic liver abscess), liver cirrhosis (alcoholic, biliary and experimental), alcoholic liver diseases (fatty liver, hepatitis, cirrhosis), parasitic (hepatic echinococcosis, fascioliasis, amebic liver abscess), jaundice (hemolytic, hepatocellular, and cholestatic), cholestasis, portal hypertension, liver enlargement, ascites, hepatitis (alcoholic hepatitis, animal hepatitis, chronic hepatitis (autoimmune, hepatitis B, hepatitis C, hepatitis D, drug induced), toxic hepatitis, viral human hepatitis (hepatitis A, hepatitis B, hepatitis C, hepatitis D, hepatitis E), Wilson's disease, granulomatous hepatitis, secondary biliary cirrhosis, hepatic encephalopathy, portal hypertension, varices, hepatic encephalopathy, primary biliary cirrhosis, primary sclerosing cholangitis, hepatocellular adenoma, hemangiomas, bile stones, liver failure (hepatic encephalopathy, acute liver failure), and liver neoplasms (angiomyolipoma, calcified liver metastases, cystic liver metastases, epithelial tumors, fibrolamellar hepatocarcinoma, focal nodular hyperplasia, hepatic adenoma, hepatobiliary cystadenoma, hepatoblastoma, hepatocellular carcinoma, hepatoma, liver cancer, liver hemangioendothelioma, mesenchymal hamartoma, mesenchymal tumors of liver, nodular regenerative hyperplasia, benign liver tumors (Hepatic cysts [Simple cysts, Polycystic liver disease, Hepatobiliary cystadenoma, Choledochal cyst], Mesenchymal tumors [Mesenchymal hamartoma, Infantile hemangioendothelioma, Hemangioma, Peliosis hepatis, Lipomas, Inflammatory pseudotumor, Miscellaneous], Epithelial tumors [Bile duct epithelium (Bile duct hamartoma, Bile duct adenoma), Hepatocyte (Adenoma, Focal nodular hyperplasia, Nodular regenerative hyperplasia)], malignant liver tumors [hepatocellular, hepatoblastoma, hepatocellular carcinoma, cholangiocellular, cholangiocarcinoma, cystadenocarcinoma, tumors of blood vessels, angiosarcoma, Karposi's sarcoma, hemangioendothelioma, other tumors, embryonal sarcoma, fibrosarcoma, leiomyosarcoma, rhabdomyosarcoma, carcinosarcoma, teratoma, carcinoid, squamous carcinoma, primary lymphoma]), peliosis hepatis, erythrohepatic porphyria, hepatic porphyria (acute intermittent porphyria, porphyria cutanea tarda), Zellweger syndrome).

[0773] Pancreatic diseases and/or disorders include acute pancreatitis, chronic pancreatitis (acute necrotizing pancreatitis, alcoholic pancreatitis), neoplasms (adenocarcinoma of the pancreas, cystadenocarcinoma, insulinoma, gastrinoma, and glucagonoma, cystic neoplasms, islet-cell tumors, pancreoblastoma), and other pancreatic diseases (e.g., cystic fibrosis, cyst (pancreatic pseudocyst, pancreatic fistula, insufficiency)).

[0774] Gallbladder diseases include gallstones (cholelithiasis and choledocholithiasis), postcholecystectomy syndrome, diverticulosis of the gallbladder, acute cholecystitis, chronic cholecystitis, bile duct tumors, and mucocele.

[0775] Diseases and/or disorders of the large intestine include antibiotic-associated colitis, diverticulitis, ulcerative colitis, acquired megacolon, abscesses, fungal and bacterial infections, anorectal disorders (e.g., fissures, hemorrhoids), colonic diseases (colitis, colonic neoplasms [colon cancer, adenomatous colon polyps (e.g., villous adenoma), colon carcinoma, colorectal cancer], colonic diverticulitis, colonic diverticulosis, megacolon [Hirschsprung disease, toxic megacolon]; sigmoid diseases [proctocolitis, sigmoin neoplasms]), constipation, Crohn's disease, diarrhea (infantile diarrhea, dysentery), duodenal diseases (duodenal neoplasms, duodenal obstruction, duodenal ulcer, duodenitis), enteritis (enterocolitis), HIV enteropathy, ileal diseases (ileal neoplasms, ileitis), immunoproliferative small intestinal disease, inflammatory bowel disease (ulcerative colitis, Crohn's disease), intestinal atresia, parasitic diseases (anisakiasis, balantidiasis, blastocystis infections, cryptosporidiosis, dientamoebiasis, amebic dysentery, giardiasis), intestinal fistula (rectal fistula), intestinal neoplasms (cecal neoplasms, colonic neoplasms, duodenal neoplasms, ileal neoplasms, intestinal polyps, jejunal neoplasms, rectal neoplasms), intestinal obstruction (afferent loop syndrome, duodenal obstruction, impacted feces, intestinal pseudo-obstruction [cecal volvulus], intussusception), intestinal perforation, intestinal polyps (colonic polyps, gardner syndrome, peutzjeghers syndrome), jejunal diseases (jejunal neoplasms), malabsorption syndromes (blind loop syndrome, celiac disease, lactose intolerance, short bowl syndrome, tropical sprue, whipple's disease), mesenteric vascular occlusion, pneumatosis cystoides intestinalis, protein-losing enteropathies (intestinal lymphagiectasis), rectal diseases (anus diseases, fecal incontinence, hemorrhoids, proctitis, rectal fistula, rectal prolapse, rectocele), peptic ulcer (duodenal ulcer, peptic esophagitis, hemorrhage, perforation, stomach ulcer, Zollinger-Ellison syndrome), postgastrectomy syndromes (dumping syndrome), stomach diseases (e.g., achlorhydria, duodenogastric reflux (bile reflux), gastric antral vascular ectasia, gastric fistula, gastric outlet obstruction, gastritis (atrophic or hypertrophic), gastroparesis, stomach dilatation, stomach diverticulum, stomach neoplasms (gastric cancer, gastric polyps, gastric adenocarcinoma, hyperplastic gastric polyp), stomach rupture, stomach ulcer, stomach volvulus), tuberculosis, visceroptosis, vomiting (e.g., hematemesis, hyperemesis gravidarum, postoperative nausea and vomiting) and hemorrhagic colitis.

[0776] Further diseases and/or disorders of the gastrointestinal system include biliary tract diseases, such as, gastroschisis, fistula (e.g., biliary fistula, esophageal fistula, gastric fistula, intestinal fistula, pancreatic fistula), neoplasms (e.g., biliary tract neoplasms, esophageal neoplasms, such as adenocarcinoma of the esophagus, esophageal squamous cell carcinoma, gastrointestinal neoplasms, pancreatic neoplasms, such as adenocarcinoma of the pancreas, mucinous cystic neoplasm of the pancreas, pancreatic cystic neoplasms, pancreatoblastoma, and peritoneal neoplasms), esophageal disease (e.g., bullous diseases, candidiasis, glycogenic acanthosis, ulceration, barrett esophagus varices, atresia, cyst, diverticulum (e.g., Zenker's diverticulum), fistula (e.g., tracheoesophageal fistula), motility disorders (e.g., CREST syndrome, deglutition disorders, achalasia, spasm, gastroesophageal reflux), neoplasms, perforation (e.g., Boerhaave syndrome, Mallory-Weiss syndrome), stenosis, esophagitis, diaphragmatic hernia (e.g., hiatal hernia); gastrointestinal diseases, such as, gastroenteritis (e.g., cholera morbus, norwalk virus infection), hemorrhage (e.g., hematemesis, melena, peptic ulcer hemorrhage), stomach neoplasms (gastric cancer, gastric polyps, gastric adenocarcinoma, stomach cancer)), hernia (e.g., congenital diaphragmatic hernia, femoral hernia, inguinal hernia, obturator hernia, umbilical hernia, ventral hernia), and intestinal diseases (e.g., cecal diseases (appendicitis, cecal neoplasms)).

[0777] Chemotaxis

[0778] Polynucleotides or polypeptides, as well as agonists or antagonists of the present invention may have chemotaxis activity. A chemotaxic molecule attracts or mobilizes cells (e.g., monocytes, fibroblasts, neutrophils, T-cells, mast cells, eosinophils, epithelial and/or endothelial cells) to a particular site in the body, such as inflammation, infection, or site of hyperproliferation. The mobilized cells can then fight off and/or heal the particular trauma or abnormality.

[0779] Polynucleotides or polypeptides, as well as agonists or antagonists of the present invention may increase chemotaxic activity of particular cells. These chemotactic molecules can then be used to treat inflammation, infection, hyperproliferative disorders, or any immune system disorder by increasing the number of cells targeted to a particular location in the body. For example, chemotaxic molecules can be used to treat wounds and other trauma to tissues by attracting immune cells to the injured location. Chemotactic molecules of the present invention can also attract fibroblasts, which can be used to treat wounds.

[0780] It is also contemplated that polynucleotides or polypeptides, as well as agonists or antagonists of the present invention may inhibit chemotactic activity. These molecules could also be used to treat disorders. Thus, polynucleotides or polypeptides, as well as agonists or antagonists of the present invention could be used as an inhibitor of chemotaxis.

[0781] Binding Activity

[0782] A polypeptide of the present invention may be used to screen for molecules that bind to the polypeptide or for molecules to which the polypeptide binds. The binding of the polypeptide and the molecule may activate (agonist), increase, inhibit (antagonist), or decrease activity of the polypeptide or the molecule bound. Examples of such molecules include antibodies, oligonucleotides, proteins (e.g., receptors),or small molecules.

[0783] Preferably, the molecule is closely related to the natural ligand of the polypeptide, e.g., a fragment of the ligand, or a natural substrate, a ligand, a structural or functional mimetic. (See, Coligan et al., Current Protocols in Immunology 1(2):Chapter 5 (1991)). Similarly, the molecule can be closely related to the natural receptor to which the polypeptide binds, or at least, a fragment of the receptor capable of being bound by the polypeptide (e.g., active site). In either case, the molecule can be rationally designed using known techniques.

[0784] Preferably, the screening for these molecules involves producing appropriate cells which express the polypeptide. Preferred cells include cells from mammals, yeast, Drosophila, or E. coli. Cells expressing the polypeptide (or cell membrane containing the expressed polypeptide) are then preferably contacted with a test compound potentially containing the molecule to observe binding, stimulation, or inhibition of activity of either the polypeptide or the molecule.

[0785] The assay may simply test binding of a candidate compound to the polypeptide, wherein binding is detected by a label, or in an assay involving competition with a labeled competitor. Further, the assay may test whether the candidate compound results in a signal generated by binding to the polypeptide.

[0786] Alternatively, the assay can be carried out using cell-free preparations, polypeptide/molecule affixed to a solid support, chemical libraries, or natural product mixtures. The assay may also simply comprise the steps of mixing a candidate compound with a solution containing a polypeptide, measuring polypeptide/molecule activity or binding, and comparing the polypeptide/molecule activity or binding to a standard.

[0787] Preferably, an ELISA assay can measure polypeptide level or activity in a sample (e.g., biological sample) using a monoclonal or polyclonal antibody. The antibody can measure polypeptide level or activity by either binding, directly or indirectly, to the polypeptide or by competing with the polypeptide for a substrate.

[0788] Additionally, the receptor to which the polypeptide of the present invention binds can be identified by numerous methods known to those of skill in the art, for example, ligand panning and FACS sorting (Coligan, et al., Current Protocols in Immun., 1(2), Chapter 5, (1991)). For example, expression cloning is employed wherein polyadenylated RNA is prepared from a cell responsive to the polypeptides, for example, NIH3T3 cells which are known to contain multiple receptors for the FGF family proteins, and SC-3 cells, and a cDNA library created from this RNA is divided into pools and used to transfect COS cells or other cells that are not responsive to the polypeptides. Transfected cells which are grown on glass slides are exposed to the polypeptide of the present invention, after they have been labeled. The polypeptides can be labeled by a variety of means including iodination or inclusion of a recognition site for a site-specific protein kinase.

[0789] Following fixation and incubation, the slides are subjected to auto-radiographic analysis. Positive pools are identified and sub-pools are prepared and re-transfected using an iterative sub-pooling and re-screening process, eventually yielding a single clones that encodes the putative receptor.

[0790] As an alternative approach for receptor identification, the labeled polypeptides can be photoaffinity linked with cell membrane or extract preparations that express the receptor molecule. Cross-linked material is resolved by PAGE analysis and exposed to X-ray film. The labeled complex containing the receptors of the polypeptides can be excised, resolved into peptide fragments, and subjected to protein microsequencing. The amino acid sequence obtained from microsequencing would be used to design a set of degenerate oligonucleotide probes to screen a cDNA library to identify the genes encoding the putative receptors.

[0791] Moreover, the techniques of gene-shuffling, motif-shuffling, exon-shuffling, and/or codon-shuffling (collectively referred to as “DNA shuffling”) may be employed to modulate the activities of the polypeptide of the present invention thereby effectively generating agonists and antagonists of the polypeptide of the present invention. See generally, U.S. Pat. Nos. 5,605,793, 5,811,238, 5,830,721, 5,834,252, and 5,837,458, and Patten, P. A., et al., Curr. Opinion Biotechnol. 8:724-33 (1997); Harayama, S. Trends Biotechnol. 16(2):76-82 (1998); Hansson, L. O., et al., J. Mol. Biol. 287:265-76 (1999); and Lorenzo, M. M. and Blasco, R. Biotechniques 24(2):308-13 (1998); each of these patents and publications are hereby incorporated by reference). In one embodiment, alteration of polynucleotides and corresponding polypeptides may be achieved by DNA shuffling. DNA shuffling involves the assembly of two or more DNA segments into a desired molecule by homologous, or site-specific, recombination. In another embodiment, polynucleotides and corresponding polypeptides may be altered by being subjected to random mutagenesis by error-prone PCR, random nucleotide insertion or other methods prior to recombination. In another embodiment, one or more components, motifs, sections, parts, domains, fragments, etc., of the polypeptide of the present invention may be recombined with one or more components, motifs, sections, parts, domains, fragments, etc. of one or more heterologous molecules. In preferred embodiments, the heterologous molecules are family members. In further preferred embodiments, the heterologous molecule is a growth factor such as, for example, platelet-derived growth factor (PDGF), insulin-like growth factor (IGF-I), transforming growth factor (TGF)-alpha, epidermal growth factor (EGF), fibroblast growth factor (FGF), TGF-beta, bone morphogenetic protein (BMP)-2, BMP-4, BMP-5, BMP-6, BMP-7, activins A and B, decapentaplegic(dpp), 60A, OP-2, dorsalin, growth differentiation factors (GDFs), nodal, MIS, inhibin-alpha, TGF-betal, TGF-beta2, TGF-beta3, TGF-beta5, and glial-derived neurotrophic factor (GDNF).

[0792] Other preferred fragments are biologically active fragments of the polypeptide of the present invention. Biologically active fragments are those exhibiting activity similar, but not necessarily identical, to an activity of the polypeptide of the present invention. The biological activity of the fragments may include an improved desired activity, or a decreased undesirable activity.

[0793] Additionally, this invention provides a method of screening compounds to identify those which modulate the action of the polypeptide of the present invention. An example of such an assay comprises combining a mammalian fibroblast cell, a the polypeptide of the present invention, the compound to be screened and ³[H] thymidine under cell culture conditions where the fibroblast cell would normally proliferate. A control assay may be performed in the absence of the compound to be screened and compared to the amount of fibroblast proliferation in the presence of the compound to determine if the compound stimulates proliferation by determining the uptake of ³[H] thymidine in each case. The amount of fibroblast cell proliferation is measured by liquid scintillation chromatography which measures the incorporation of ³[H] thymidine. Both agonist and antagonist compounds may be identified by this procedure.

[0794] In another method, a mammalian cell or membrane preparation expressing a receptor for a polypeptide of the present invention is incubated with a labeled polypeptide of the present invention in the presence of the compound. The ability of the compound to enhance or block this interaction could then be measured. Alternatively, the response of a known second messenger system following interaction of a compound to be screened and the receptor is measured and the ability of the compound to bind to the receptor and elicit a second messenger response is measured to determine if the compound is a potential agonist or antagonist. Such second messenger systems include but are not limited to, cAMP guanylate cyclase, ion channels or phosphoinositide hydrolysis.

[0795] All of these above assays can be used as diagnostic or prognostic markers. The molecules discovered using these assays can be used to treat disease or to bring about a particular result in a patient (e.g., blood vessel growth) by activating or inhibiting the polypeptide/molecule. Moreover, the assays can discover agents which may inhibit or enhance the production of the polypeptides of the invention from suitably manipulated cells or tissues.

[0796] Therefore, the invention includes a method of identifying compounds which bind to a polypeptide of the invention comprising the steps of: (a) incubating a candidate binding compound with a polypeptide of the present invention; and (b) determining if binding has occurred. Moreover, the invention includes a method of identifying agonists/antagonists comprising the steps of: (a) incubating a candidate compound with a polypeptide of the present invention, (b) assaying a biological activity, and (b) determining if a biological activity of the polypeptide has been altered.

[0797] Targeted Delivery

[0798] In another embodiment, the invention provides a method of delivering compositions to targeted cells expressing a receptor for a polypeptide of the invention, or cells expressing a cell bound form of a polypeptide of the invention.

[0799] As discussed herein, polypeptides or antibodies of the invention may be associated with heterologous polypeptides, heterologous nucleic acids, toxins, or prodrugs via hydrophobic, hydrophilic, ionic and/or covalent interactions. In one embodiment, the invention provides a method for the specific delivery of compositions of the invention to cells by administering polypeptides of the invention (including antibodies) that are associated with heterologous polypeptides or nucleic acids. In one example, the invention provides a method for delivering a therapeutic protein into the targeted cell. In another example, the invention provides a method for delivering a single stranded nucleic acid (e.g., antisense or ribozymes) or double stranded nucleic acid (e.g., DNA that can integrate into the cell's genome or replicate episomally and that can be transcribed) into the targeted cell.

[0800] In another embodiment, the invention provides a method for the specific destruction of cells (e.g., the destruction of tumor cells) by administering polypeptides of the invention (e.g., polypeptides of the invention or antibodies of the invention) in association with toxins or cytotoxic prodrugs.

[0801] By “toxin” is meant compounds that bind and activate endogenous cytotoxic effector systems, radioisotopes, holotoxins, modified toxins, catalytic subunits of toxins, or any molecules or enzymes not normally present in or on the surface of a cell that under defined conditions cause the cell's death. Toxins that may be used according to the methods of the invention include, but are not limited to, radioisotopes known in the art, compounds such as, for example, antibodies (or complement fixing containing portions thereof) that bind an inherent or induced endogenous cytotoxic effector system, thymidine kinase, endonuclease, RNAse, alpha toxin, ricin, abrin, Pseudomonas exotoxin A, diphtheria toxin, saporin, momordin, gelonin, pokeweed antiviral protein, alpha-sarcin and cholera toxin. By “cytotoxic prodrug” is meant a non-toxic compound that is converted by an enzyme, normally present in the cell, into a cytotoxic compound. Cytotoxic prodrugs that may be used according to the methods of the invention include, but are not limited to, glutamyl derivatives of benzoic acid mustard alkylating agent, phosphate derivatives of etoposide or mitomycin C, cytosine arabinoside, daunorubisin, and phenoxyacetamide derivatives of doxorubicin.

[0802] Drug Screening

[0803] Further contemplated is the use of the polypeptides of the present invention, or the polynucleotides encoding these polypeptides, to screen for molecules which modify the activities of the polypeptides of the present invention. Such a method would include contacting the polypeptide of the present invention with a selected compound(s) suspected of having antagonist or agonist activity, and assaying the activity of these polypeptides following binding.

[0804] This invention is particularly useful for screening therapeutic compounds by using the polypeptides of the present invention, or binding fragments thereof, in any of a variety of drug screening techniques. The polypeptide or fragment employed in such a test may be affixed to a solid support, expressed on a cell surface, free in solution, or located intracellularly. One method of drug screening utilizes eukaryotic or prokaryotic host cells which are stably transformed with recombinant nucleic acids expressing the polypeptide or fragment. Drugs are screened against such transformed cells in competitive binding assays. One may measure, for example, the formulation of complexes between the agent being tested and a polypeptide of the present invention.

[0805] Thus, the present invention provides methods of screening for drugs or any other agents which affect activities mediated by the polypeptides of the present invention. These methods comprise contacting such an agent with a polypeptide of the present invention or a fragment thereof and assaying for the presence of a complex between the agent and the polypeptide or a fragment thereof, by methods well known in the art. In such a competitive binding assay, the agents to screen are typically labeled. Following incubation, free agent is separated from that present in bound form, and the amount of free or uncomplexed label is a measure of the ability of a particular agent to bind to the polypeptides of the present invention.

[0806] Another technique for drug screening provides high throughput screening for compounds having suitable binding affinity to the polypeptides of the present invention, and is described in great detail in European Patent Application 84/03564, published on Sep. 13, 1984, which is incorporated herein by reference herein. Briefly stated, large numbers of different small peptide test compounds are synthesized on a solid substrate, such as plastic pins or some other surface. The peptide test compounds are reacted with polypeptides of the present invention and washed. Bound polypeptides are then detected by methods well known in the art. Purified polypeptides are coated directly onto plates for use in the aforementioned drug screening techniques. In addition, non-neutralizing antibodies may be used to capture the peptide and immobilize it on the solid support.

[0807] This invention also contemplates the use of competitive drug screening assays in which neutralizing antibodies capable of binding polypeptides of the present invention specifically compete with a test compound for binding to the polypeptides or fragments thereof. In this manner, the antibodies are used to detect the presence of any peptide which shares one or more antigenic epitopes with a polypeptide of the invention.

[0808] Antisense and Ribozyme (Antagonists)

[0809] In specific embodiments, antagonists according to the present invention are nucleic acids corresponding to the sequences contained in SEQ ID NO:X, or the complementary strand thereof, and/or to cDNA sequences contained in cDNA Clone ID NO:Z identified for example, in Table 1A. In one embodiment, antisense sequence is generated internally, by the organism, in another embodiment, the antisense sequence is separately administered (see, for example, O'Connor, J., Neurochem. 56:560 (1991). Oligodeoxynucleotides as Antisense Inhibitors of Gene Expression, CRC Press, Boca Raton, Fla. (1988). Antisense technology can be used to control gene expression through antisense DNA or RNA, or through triple-helix formation. Antisense techniques are discussed for example, in Okano, J., Neurochem. 56:560 (1991); Oligodeoxynucleotides as Antisense Inhibitors of Gene Expression, CRC Press, Boca Raton, Fla. (1988). Triple helix formation is discussed in, for instance, Lee et al., Nucleic Acids Research 6:3073 (1979); Cooney et al., Science 241:456 (1988); and Dervan et al., Science 251:1300 (1991). The methods are based on binding of a polynucleotide to a complementary DNA or RNA.

[0810] For example, the use of c-myc and c-myb antisense RNA constructs to inhibit the growth of the non-lymphocytic leukemia cell line HL-60 and other cell lines was previously described. (Wickstrom et al. (1988); Anfossi et al. (1989)). These experiments were performed in vitro by incubating cells with the oligoribonucleotide. A similar procedure for in vivo use is described in WO 91/15580. Briefly, a pair of oligonucleotides for a given antisense RNA is produced as follows: A sequence complimentary to the first 15 bases of the open reading frame is flanked by an EcoRl site on the 5 end and a HindIII site on the 3 end. Next, the pair of oligonucleotides is heated at 90° C. for one minute and then annealed in 2× ligation buffer (20 mM TRIS HCl pH 7.5, 10 mM MgCl2, 10 MM dithiothreitol (DTT) and 0.2 mM ATP) and then ligated to the EcoRl/Hind III site of the retroviral vector PMV7 (WO 91/15580).

[0811] For example, the 5′ coding portion of a polynucleotide that encodes the polypeptide of the present invention may be used to design an antisense RNA oligonucleotide of from about 10 to 40 base pairs in length. A DNA oligonucleotide is designed to be complementary to a region of the gene involved in transcription thereby preventing transcription and the production of the receptor. The antisense RNA oligonucleotide hybridizes to the mRNA in vivo and blocks translation of the mRNA molecule into receptor polypeptide.

[0812] In one embodiment, the antisense nucleic acid of the invention is produced intracellularly by transcription from an exogenous sequence. For example, a vector or a portion thereof, is transcribed, producing an antisense nucleic acid (RNA) of the invention. Such a vector would contain a sequence encoding the antisense nucleic acid. Such a vector can remain episomal or become chromosomally integrated, as long as it can be transcribed to produce the desired antisense RNA. Such vectors can be constructed by recombinant DNA technology methods standard in the art. Vectors can be plasmid, viral, or others known in the art, used for replication and expression in vertebrate cells. Expression of the sequence encoding the polypeptide of the present invention or fragments thereof, can be by any promoter known in the art to act in vertebrate, preferably human cells. Such promoters can be inducible or constitutive. Such promoters include, but are not limited to, the SV40 early promoter region (Bernoist and Chambon, Nature 29:304-310 (1981), the promoter contained in the 3′ long terminal repeat of Rous sarcoma virus (Yamamoto et al., Cell 22:787-797 (1980), the herpes thymidine promoter (Wagner et al., Proc. Natl. Acad. Sci. U.S.A. 78:1441-1445 (1981), the regulatory sequences of the metallothionein gene (Brinster, et al., Nature 296:39-42 (1982)), etc.

[0813] The antisense nucleic acids of the invention comprise a sequence complementary to at least a portion of an RNA transcript of a gene of the present invention. However, absolute complementarity, although preferred, is not required. A sequence “complementary to at least a portion of an RNA,” referred to herein, means a sequence having sufficient complementarity to be able to hybridize with the RNA, forming a stable duplex; in the case of double stranded antisense nucleic acids, a single strand of the duplex DNA may thus be tested, or triplex formation may be assayed. The ability to hybridize will depend on both the degree of complementarity and the length of the antisense nucleic acid. Generally, the larger the hybridizing nucleic acid, the more base mismatches with a RNA it may contain and still form a stable duplex (or triplex as the case may be). One skilled in the art can ascertain a tolerable degree of mismatch by use of standard procedures to determine the melting point of the hybridized complex.

[0814] Oligonucleotides that are complementary to the 5′ end of the message, e.g., the 5′ untranslated sequence up to and including the AUG initiation codon, should work most efficiently at inhibiting translation. However, sequences complementary to the 3′ untranslated sequences of mRNAs have been shown to be effective at inhibiting translation of mRNAs as well. See generally, Wagner, R., 1994, Nature 372:333-335. Thus, oligonucleotides complementary to either the 5′- or 3′-non-translated, non-coding regions of polynucleotide sequences described herein could be used in an antisense approach to inhibit translation of endogenous mRNA. Oligonucleotides complementary to the 5′ untranslated region of the mRNA should include the complement of the AUG start codon. Antisense oligonucleotides complementary to mRNA coding regions are less efficient inhibitors of translation but could be used in accordance with the invention. Whether designed to hybridize to the 5′-, 3′- or coding region of mRNA of the present invention, antisense nucleic acids should be at least six nucleotides in length, and are preferably oligonucleotides ranging from 6 to about 50 nucleotides in length. In specific aspects the oligonucleotide is at least 10 nucleotides, at least 17 nucleotides, at least 25 nucleotides or at least 50 nucleotides.

[0815] The polynucleotides of the invention can be DNA or RNA or chimeric mixtures or derivatives or modified versions thereof, single-stranded or double-stranded. The oligonucleotide can be modified at the base moiety, sugar moiety, or phosphate backbone, for example, to improve stability of the molecule, hybridization, etc. The oligonucleotide may include other appended groups such as peptides (e.g., for targeting host cell receptors in vivo), or agents facilitating transport across the cell membrane (see, e.g., Letsinger et al., 1989, Proc. Natl. Acad. Sci. U.S.A. 86:6553-6556; Lemaitre et al., 1987, Proc. Natl. Acad. Sci. 84:648-652; PCT Publication No. WO88/09810, published Dec. 15, 1988) or the blood-brain barrier (see, e.g., PCT Publication No. WO89/10134, published Apr. 25, 1988), hybridization-triggered cleavage agents. (See, e.g., Krol et al., 1988, BioTechniques 6:958-976) or intercalating agents. (See, e.g., Zon, 1988, Pharm. Res. 5:539-549). To this end, the oligonucleotide may be conjugated to another molecule, e.g., a peptide, hybridization triggered cross-linking agent, transport agent, hybridization-triggered cleavage agent, etc.

[0816] The antisense oligonucleotide may comprise at least one modified base moiety which is selected from the group including, but not limited to, 5-fluorouracil, 5-bromouracil, 5-chlorouracil, 5-iodouracil, hypoxanthine, xantine, 4-acetylcytosine, 5-(carboxyhydroxylmethyl) uracil, 5-carboxymethylaminomethyl-2-thiouridine, 5-carboxymethylaminomethyluracil, dihydrouracil, beta-D-galactosylqueosine, inosine, N6-isopentenyladenine, 1-methylguanine, 1-methylinosine, 2,2-dimethylguanine, 2-methyladenine, 2-methylguanine, 3-methylcytosine, 5-methylcytosine, N6-adenine, 7-methylguanine, 5-methylaminomethyluracil, 5-methoxyaminomethyl-2-thiouracil, beta-D-mannosylqueosine, 5′-methoxycarboxymethyluracil, 5-methoxyuracil, 2-methylthio-N6-isopentenyladenine, uracil-5-oxyacetic acid (v), wybutoxosine, pseudouracil, queosine, 2-thiocytosine, 5-methyl-2-thiouracil, 2-thiouracil, 4-thiouracil, 5-methyluracil, uracil-5-oxyacetic acid methylester, uracil-5-oxyacetic acid (v), 5-methyl-2-thiouracil, 3-(3-amino-3-N-2-carboxypropyl) uracil, (acp3)w, and 2,6-diaminopurine.

[0817] The antisense oligonucleotide may also comprise at least one modified sugar moiety selected from the group including, but not limited to, arabinose, 2-fluoroarabinose, xylulose, and hexose.

[0818] In yet another embodiment, the antisense oligonucleotide comprises at least one modified phosphate backbone selected from the group including, but not limited to, a pbosphorothioate, a phosphorodithioate, a phosphoramidothioate, a phosphoramidate, a phosphordiamidate, a methylphosphonate, an alkyl phosphotriester, and a formacetal or analog thereof.

[0819] In yet another embodiment, the antisense oligonucleotide is an a-anomeric oligonucleotide. An a-anomeric oligonucleotide forms specific double-stranded hybrids with complementary RNA in which, contrary to the usual b-units, the strands run parallel to each other (Gautier et al., 1987, Nucl. Acids Res. 15:6625-6641). The oligonucleotide is a 2′-0-methylribonucleotide (Inoue et al., 1987, Nucl. Acids Res. 15:6131-6148), or a chimeric RNA-DNA analogue (Inoue et al., 1987, FEBS Lett. 215:327-330).

[0820] Polynucleotides of the invention may be synthesized by standard methods known in the art, e.g. by use of an automated DNA synthesizer (such as are commercially available from Biosearch, Applied Biosystems, etc.). As examples, phosphorothioate oligonucleotides may be synthesized by the method of Stein et al. (1988, Nucl. Acids Res. 16:3209), methylphosphonate oligonucleotides can be prepared by use of controlled pore glass polymer supports (Sarin et al., 1988, Proc. Natl. Acad. Sci. U.S.A. 85:7448-7451), etc.

[0821] While antisense nucleotides complementary to the coding region sequence could be used, those complementary to the transcribed untranslated region are most preferred.

[0822] Potential antagonists according to the invention also include catalytic RNA, or a ribozyme (See, e.g., PCT International Publication WO 90/11364, published Oct. 4, 1990; Sarver et al, Science 247:1222-1225 (1990). While ribozymes that cleave mRNA at site specific recognition sequences can be used to destroy mRNAs, the use of hammerhead ribozymes is preferred. Hammerhead ribozymes cleave mRNAs at locations dictated by flanking regions that form complementary base pairs with the target mRNA. The sole requirement is that the target mRNA have the following sequence of two bases: 5′-UG-3′. The construction and production of hammerhead ribozymes is well known in the art and is described more fully in Haseloff and Gerlach, Nature 334:585-591 (1988). There are numerous potential hammerhead ribozyme cleavage sites within the nucleotide sequence of SEQ ID NO:X. Preferably, the ribozyme is engineered so that the cleavage recognition site is located near the 5′ end of the mRNA; i.e., to increase efficiency and minimize the intracellular accumulation of non-functional mRNA transcripts.

[0823] As in the antisense approach, the ribozymes of the invention can be composed of modified oligonucleotides (e.g., for improved stability, targeting, etc.) and should be delivered to cells which express in vivo. DNA constructs encoding the ribozyme may be introduced into the cell in the same manner as described above for the introduction of antisense encoding DNA. A preferred method of delivery involves using a DNA construct “encoding” the ribozyme under the control of a strong constitutive promoter, such as, for example, pol III or pol II promoter, so that transfected cells will produce sufficient quantities of the ribozyme to destroy endogenous messages and inhibit translation. Since ribozymes unlike antisense molecules, are catalytic, a lower intracellular concentration is required for efficiency.

[0824] Antagonist/agonist compounds may be employed to inhibit the cell growth and proliferation effects of the polypeptides of the present invention on neoplastic cells and tissues, i.e. stimulation of angiogenesis of tumors, and, therefore, retard or prevent abnormal cellular growth and proliferation, for example, in tumor formation or growth.

[0825] The antagonist/agonist may also be employed to prevent hyper-vascular diseases, and prevent the proliferation of epithelial lens cells after extracapsular cataract surgery. Prevention of the mitogenic activity of the polypeptides of the present invention may also be desirous in cases such as restenosis after balloon angioplasty.

[0826] The antagonist/agonist may also be employed to prevent the growth of scar tissue during wound healing.

[0827] The antagonist/agonist may also be employed to treat the diseases described herein.

[0828] Thus, the invention provides a method of treating disorders or diseases, including but not limited to the disorders or diseases listed throughout this application, associated with overexpression of a polynucleotide of the present invention by administering to a patient (a) an antisense molecule directed to the polynucleotide of the present invention, and/or (b) a ribozyme directed to the polynucleotide of the present invention.

[0829] Binding Peptides and Other Molecules

[0830] The invention also encompasses screening methods for identifying polypeptides and nonpolypeptides that bind polypeptides of the invention, and the binding molecules identified thereby. These binding molecules are useful, for example, as agonists and antagonists of the polypeptides of the invention. Such agonists and antagonists can be used, in accordance with the invention, in the therapeutic embodiments described in detail, below.

[0831] This method comprises the steps of:

[0832] contacting polypeptides of the invention with a plurality of molecules; and

[0833] identifying a molecule that binds the polypeptides of the invention.

[0834] The step of contacting the polypeptides of the invention with the plurality of molecules may be effected in a number of ways. For example, one may contemplate immobilizing the polypeptides on a solid support and bringing a solution of the plurality of molecules in contact with the immobilized polypeptides. Such a procedure would be akin to an affinity chromatographic process, with the affinity matrix being comprised of the immobilized polypeptides of the invention. The molecules having a selective affinity for the polypeptides can then be purified by affinity selection. The nature of the solid support, process for attachment of the polypeptides to the solid support, solvent, and conditions of the affinity isolation or selection are largely conventional and well known to those of ordinary skill in the art.

[0835] Alternatively, one may also separate a plurality of polypeptides into substantially separate fractions comprising a subset of or individual polypeptides. For instance, one can separate the plurality of polypeptides by gel electrophoresis, column chromatography, or like method known to those of ordinary skill for the separation of polypeptides. The individual polypeptides can also be produced by a transformed host cell in such a way as to be expressed on or about its outer surface (e.g., a recombinant phage). Individual isolates can then be “probed” by the polypeptides of the invention, optionally in the presence of an inducer should one be required for expression, to determine if any selective affinity interaction takes place between the polypeptides and the individual clone. Prior to contacting the polypeptides with each fraction comprising individual polypeptides, the polypeptides could first be transferred to a solid support for additional convenience. Such a solid support may simply be a piece of filter membrane, such as one made of nitrocellulose or nylon. In this manner, positive clones could be identified from a collection of transformed host cells of an expression library, which harbor a DNA construct encoding a polypeptide having a selective affinity for polypeptides of the invention. Furthermore, the amino acid sequence of the polypeptide having a selective affinity for the polypeptides of the invention can be determined directly by conventional means or the coding sequence of the DNA encoding the polypeptide can frequently be determined more conveniently. The primary sequence can then be deduced from the corresponding DNA sequence. If the amino acid sequence is to be determined from the polypeptide itself, one may use microsequencing techniques. The sequencing technique may include mass spectroscopy.

[0836] In certain situations, it may be desirable to wash away any unbound polypeptides from a mixture of the polypeptides of the invention and the plurality of polypeptides prior to attempting to determine or to detect the presence of a selective affinity interaction. Such a wash step may be particularly desirable when the polypeptides of the invention or the plurality of polypeptides are bound to a solid support.

[0837] The plurality of molecules provided according to this method may be provided by way of diversity libraries, such as random or combinatorial peptide or nonpeptide libraries which can be screened for molecules that specifically bind polypeptides of the invention. Many libraries are known in the art that can be used, e.g., chemically synthesized libraries, recombinant (e.g., phage display libraries), and in vitro translation-based libraries. Examples of chemically synthesized libraries are described in Fodor et al., 1991, Science 251:767-773; Houghten et al., 1991, Nature 354:84-86; Lam et al., 1991, Nature 354:82-84; Medynski, 1994, Bio/Technology 12:709-710;Gallop et al., 1994, J. Medicinal Chemistry 37(9):1233-1251; Ohlmeyer et al., 1993, Proc. Natl. Acad. Sci. USA 90:10922-10926; Erb et al., 1994, Proc. Natl. Acad. Sci. USA 91:11422-11426; Houghten et al., 1992, Biotechniques 13:412; Jayawickreme et al., 1994, Proc. Natl. Acad. Sci. USA 91:1614-1618; Salmon et al., 1993, Proc. Natl. Acad. Sci. USA 90:11708-11712; PCT Publication No. WO 93/20242; and Brenner and Lemer, 1992, Proc. Natl. Acad. Sci. USA 89:5381-5383.

[0838] Examples of phage display libraries are described in Scott and Smith, 1990, Science 249:386-390; Devlin et al., 1990, Science, 249:404-406; Christian, R. B., et al., 1992, J. Mol. Biol. 227:711-718); Lenstra, 1992, J. Immunol. Meth. 152:149-157; Kay et al., 1993, Gene 128:59-65; and PCT Publication No. WO 94/18318 dated Aug. 18, 1994. 107671 In vitro translation-based libraries include but are not limited to those described in PCT Publication No. WO 91/05058 dated Apr. 18, 1991; and Mattheakis et al., 1994, Proc. Natl. Acad. Sci. USA 91:9022-9026.

[0839] By way of examples of nonpeptide libraries, a benzodiazepine library (see e.g., Bunin et al., 1994, Proc. Natl. Acad. Sci. USA 91:4708-4712) can be adapted for use. Peptoid libraries (Simon et al., 1992, Proc. Natl. Acad. Sci. USA 89:9367-9371) can also be used. Another example of a library that can be used, in which the amide functionalities in peptides have been permethylated to generate a chemically transformed combinatorial library, is described by Ostresh et al. (1994, Proc. Natl. Acad. Sci. USA 91:11138-11142).

[0840] The variety of non-peptide libraries that are useful in the present invention is great. For example, Ecker and Crooke, 1995, Bio/Technology 13:351-360 list benzodiazepines, hydantoins, piperazinediones, biphenyls, sugar analogs, beta-mercaptoketones, arylacetic acids, acylpiperidines, benzopyrans, cubanes, xanthines, aminimides, and oxazolones as among the chemical species that form the basis of various libraries.

[0841] Non-peptide libraries can be classified broadly into two types: decorated monomers and oligomers. Decorated monomer libraries employ a relatively simple scaffold structure upon which a variety functional groups is added. Often the scaffold will be a molecule with a known useful pharmacological activity. For example, the scaffold might be the benzodiazepine structure.

[0842] Non-peptide oligomer libraries utilize a large number of monomers that are assembled together in ways that create new shapes that depend on the order of the monomers. Among the monomer units that have been used are carbamates, pyrrolinones, and morpholinos. Peptoids, peptide-like oligomers in which the side chain is attached to the alpha amino group rather than the alpha carbon, form the basis of another version of non-peptide oligomer libraries. The first non-peptide oligomer libraries utilized a single type of monomer and thus contained a repeating backbone. Recent libraries have utilized more than one monomer, giving the libraries added flexibility.

[0843] Screening the libraries can be accomplished by any of a variety of commonly known methods. See, e.g., the following references, which disclose screening of peptide libraries: Parmley and Smith, 1989, Adv. Exp. Med. Biol. 251:215-218; Scott and Smith, 1990, Science 249:386-390; Fowlkes et al., 1992; BioTechniques 13:422-427; Oldenburg et al., 1992, Proc. Natl. Acad. Sci. USA 89:5393-5397; Yu et al., 1994, Cell 76:933-945; Staudt et al., 1988, Science 241:577-580; Bock et al., 1992, Nature 355:564-566; Tuerk et al., 1992, Proc. Natl. Acad. Sci. USA 89:6988-6992; Ellington et al., 1992, Nature 355:850-852; U.S. Pat. No. 5,096,815, U.S. Pat. No. 5,223,409, and U.S. Pat. No. 5,198,346, all to Ladner et al.; Rebar and Pabo, 1993, Science 263:671-673; and CT Publication No. WO 94/18318.

[0844] In a specific embodiment, screening to identify a molecule that binds polypeptides of the invention can be carried out by contacting the library members with polypeptides of the invention immobilized on a solid phase and harvesting those library members that bind to the polypeptides of the invention. Examples of such screening methods, termed “panning” techniques are described by way of example in Parmley and Smith, 1988, Gene 73:305-318; Fowlkes et al., 1992, BioTechniques 13:422-427; PCT Publication No. WO 94/18318; and in references cited herein.

[0845] In another embodiment, the two-hybrid system for selecting interacting proteins in yeast (Fields and Song, 1989, Nature 340:245-246; Chien et al., 1991, Proc. Natl. Acad. Sci. USA 88:9578-9582) can be used to identify molecules that specifically bind to polypeptides of the invention.

[0846] Where the binding molecule is a polypeptide, the polypeptide can be conveniently selected from any peptide library, including random peptide libraries, combinatorial peptide libraries, or biased peptide libraries. The term “biased” is used herein to mean that the method of generating the library is manipulated so as to restrict one or more parameters that govern the diversity of the resulting collection of molecules, in this case peptides.

[0847] Thus, a truly random peptide library would generate a collection of peptides in which the probability of finding a particular amino acid at a given position of the peptide is the same for all 20 amino acids. A bias can be introduced into the library, however, by specifying, for example, that a lysine occur every fifth amino acid or that positions 4, 8, and 9 of a decapeptide library be fixed to include only arginine. Clearly, many types of biases can be contemplated, and the present invention is not restricted to any particular bias. Furthermore, the present invention contemplates specific types of peptide libraries, such as phage displayed peptide libraries and those that utilize a DNA construct comprising a lambda phage vector with a DNA insert.

[0848] As mentioned above, in the case of a binding molecule that is a polypeptide, the polypeptide may have about 6 to less than about 60 amino acid residues, preferably about 6 to about 10 amino acid residues, and most preferably, about 6 to about 22 amino acids. In another embodiment, a binding polypeptide has in the range of 15-100 amino acids, or 20-50 amino acids.

[0849] The selected binding polypeptide can be obtained by chemical synthesis or recombinant expression.

[0850] Other Activities

[0851] A polypeptide, polynucleotide, agonist, or antagonist of the present invention, as a result of the ability to stimulate vascular endothelial cell growth, may be employed in treatment for stimulating re-vascularization of ischemic tissues due to various disease conditions such as thrombosis, arteriosclerosis, and other cardiovascular conditions. The polypeptide, polynucleotide, agonist, or antagonist of the present invention may also be employed to stimulate angiogenesis and limb regeneration, as discussed above.

[0852] A polypeptide, polynucleotide, agonist, or antagonist of the present invention may also be employed for treating wounds due to injuries, burns, post-operative tissue repair, and ulcers since they are mitogenic to various cells of different origins, such as fibroblast cells and skeletal muscle cells, and therefore, facilitate the repair or replacement of damaged or diseased tissue.

[0853] A polypeptide, polynucleotide, agonist, or antagonist of the present invention may also be employed stimulate neuronal growth and to treat and prevent neuronal damage which occurs in certain neuronal disorders or neuro-degenerative conditions such as Alzheimer's disease, Parkinson's disease, and AIDS-related complex. A polypeptide, polynucleotide, agonist, or antagonist of the present invention may have the ability to stimulate chondrocyte growth, therefore, they may be employed to enhance bone and periodontal regeneration and aid in tissue transplants or bone grafts.

[0854] A polypeptide, polynucleotide, agonist, or antagonist of the present invention may be also be employed to prevent skin aging due to sunburn by stimulating keratinocyte growth.

[0855] A polypeptide, polynucleotide, agonist, or antagonist of the present invention may also be employed for preventing hair loss, since FGF family members activate hair-forming cells and promotes melanocyte growth. Along the same lines, a polypeptide, polynucleotide, agonist, or antagonist of the present invention may be employed to stimulate growth and differentiation of hematopoietic cells and bone marrow cells when used in combination with other cytokines.

[0856] A polypeptide, polynucleotide, agonist, or antagonist of the present invention may also be employed to maintain organs before transplantation or for supporting cell culture of primary tissues. A polypeptide, polynucleotide, agonist, or antagonist of the present invention may also be employed for inducing tissue of mesodermal origin to differentiate in early embryos.

[0857] A polypeptide, polynucleotide, agonist, or antagonist of the present invention may also increase or decrease the differentiation or proliferation of embryonic stem cells, besides, as discussed above, hematopoietic lineage.

[0858] A polypeptide, polynucleotide, agonist, or antagonist of the present invention may also be used to modulate mammalian characteristics, such as body height, weight, hair color, eye color, skin, percentage of adipose tissue, pigmentation, size, and shape (e.g., cosmetic surgery). Similarly, a polypeptide, polynucleotide, agonist, or antagonist of the present invention may be used to modulate mammalian metabolism affecting catabolism, anabolism, processing, utilization, and storage of energy.

[0859] A polypeptide, polynucleotide, agonist, or antagonist of the present invention may be used to change a mammal's mental state or physical state by influencing biorhythms, caricadic rhythms, depression (including depressive disorders), tendency for violence, tolerance for pain, reproductive capabilities (preferably by Activin or Inhibin-like activity), hormonal or endocrine levels, appetite, libido, memory, stress, or other cognitive qualities.

[0860] A polypeptide, polynucleotide, agonist, or antagonist of the present invention may also be used as a food additive or preservative, such as to increase or decrease storage capabilities, fat content, lipid, protein, carbohydrate, vitamins, minerals, cofactors or other nutritional components.

[0861] The above-recited applications have uses in a wide variety of hosts. Such hosts include, but are not limited to, human, murine, rabbit, goat, guinea pig, camel, horse, mouse, rat, hamster, pig, micro-pig, chicken, goat, cow, sheep, dog, cat, non-human primate, and human. In specific embodiments, the host is a mouse, rabbit, goat, guinea pig, chicken, rat, hamster, pig, sheep, dog or cat. In preferred embodiments, the host is a mammal. In most preferred embodiments, the host is a human.

[0862] Other Preferred Embodiments

[0863] Other preferred embodiments of the claimed invention include an isolated nucleic acid molecule comprising a nucleotide sequence which is at least 95% identical to a sequence of at least about 50 contiguous nucleotides in the nucleotide sequence of SEQ ID NO:X or the complementary strand thereto, the nucleotide sequence as defined in column 5 of Table 1A or columns 8 and 9 of Table 2 or the complementary strand thereto, and/or cDNA contained in Clone ID NO:Z.

[0864] Also preferred is a nucleic acid molecule wherein said sequence of contiguous nucleotides is included in the nucleotide sequence of the portion of SEQ ID NO:X as defined in column 5, “ORF (From-To)”, in Table 1A.

[0865] Also preferred is a nucleic acid molecule wherein said sequence of contiguous nucleotides is included in the nucleotide sequence of the portion of SEQ ID NO:X as defined in columns 8 and 9, “NT From” and “NT To” respectively, in Table 2.

[0866] Also preferred is an isolated nucleic acid molecule comprising a nucleotide sequence which is at least 95% identical to a sequence of at least about 150 contiguous nucleotides in the nucleotide sequence of SEQ ID NO:X or the complementary strand thereto, the nucleotide sequence as defined in column 5 of Table 1A or columns 8 and 9 of Table 2 or the complementary strand thereto, and/or cDNA contained in Clone ID NO:Z.

[0867] Further preferred is an isolated nucleic acid molecule comprising a nucleotide sequence which is at least 95% identical to a sequence of at least about 500 contiguous nucleotides in the nucleotide sequence of SEQ ID NO:X or the complementary strand thereto, the nucleotide sequence as defined in column 5 of Table 1A or columns 8 and 9 of Table 2 or the complementary strand thereto, and/or cDNA contained in Clone ID NO:Z.

[0868] A further preferred embodiment is a nucleic acid molecule comprising a nucleotide sequence which is at least 95% identical to the nucleotide sequence of the portion of SEQ ID NO:X defined in column 5, “ORF (From-To)”, in Table 1A.

[0869] A further preferred embodiment is a nucleic acid molecule comprising a nucleotide sequence which is at least 95% identical to the nucleotide sequence of the portion of SEQ ID NO:X defined in columns 8 and 9, “NT From” and “NT To”, respectively, in Table 2.

[0870] A further preferred embodiment is an isolated nucleic acid molecule comprising a nucleotide sequence which is at least 95% identical to the complete nucleotide sequence of SEQ ID NO:X or the complementary strand thereto, the nucleotide sequence as defined in column 5 of Table 1A or columns 8 and 9 of Table 2 or the complementary strand thereto, and/or cDNA contained in Clone ID NO:Z.

[0871] Also preferred is an isolated nucleic acid molecule which hybridizes under stringent hybridization conditions to a nucleic acid molecule comprising a nucleotide sequence of SEQ ID NO:X or the complementary strand thereto, the nucleotide sequence as defined in column 5 of Table 1 A or columns 8 and 9 of Table 2 or the complementary strand thereto, and/or cDNA contained in Clone ID NO Z, wherein said nucleic acid molecule which hybridizes does not hybridize under stringent hybridization conditions to a nucleic acid molecule having a nucleotide sequence consisting of only A residues or of only T residues.

[0872] Also preferred is a composition of matter comprising a DNA molecule which comprises the cDNA contained in Clone ID NO:Z.

[0873] Also preferred is an isolated nucleic acid molecule comprising a nucleotide sequence which is at least 95% identical to a sequence of at least 50 contiguous nucleotides of the cDNA sequence contained in Clone ID NO:Z.

[0874] Also preferred is an isolated nucleic acid molecule, wherein said sequence of at least 50 contiguous nucleotides is included in the nucleotide sequence of an open reading frame sequence encoded by cDNA contained in Clone ID NO:Z.

[0875] Also preferred is an isolated nucleic acid molecule comprising a nucleotide sequence which is at least 95% identical to sequence of at least 150 contiguous nucleotides in the nucleotide sequence encoded by cDNA contained in Clone ID NO:Z.

[0876] A further preferred embodiment is an isolated nucleic acid molecule comprising a nucleotide sequence which is at least 95% identical to sequence of at least 500 contiguous nucleotides in the nucleotide sequence encoded by cDNA contained in Clone ID NO:Z.

[0877] A further preferred embodiment is an isolated nucleic acid molecule comprising a nucleotide sequence which is at least 95% identical to the complete nucleotide sequence encoded by cDNA contained in Clone ID NO:Z.

[0878] A further preferred embodiment is a method for detecting in a biological sample a nucleic acid molecule comprising a nucleotide sequence which is at least 95% identical to a sequence of at least 50 contiguous nucleotides in a sequence selected from the group consisting of: a nucleotide sequence of SEQ ID NO:X or the complementary strand thereto; the nucleotide sequence as defined in column 5 of Table 1A or columns 8 and 9 of Table 2 or the complementary strand thereto; and a nucleotide sequence encoded by cDNA contained in Clone ID NO:Z; which method comprises a step of comparing a nucleotide sequence of at least one nucleic acid molecule in said sample with a sequence selected from said group and determining whether the sequence of said nucleic acid molecule in said sample is at least 95% identical to said selected sequence.

[0879] Also preferred is the above method wherein said step of comparing sequences comprises determining the extent of nucleic acid hybridization between nucleic acid molecules in said sample and a nucleic acid molecule comprising said sequence selected from said group. Similarly, also preferred is the above method wherein said step of comparing sequences is performed by comparing the nucleotide sequence determined from a nucleic acid molecule in said sample with said sequence selected from said group. The nucleic acid molecules can comprise DNA molecules or RNA molecules.

[0880] A further preferred embodiment is a method for identifying the species, tissue or cell type of a biological sample which method comprises a step of detecting nucleic acid molecules in said sample, if any, comprising a nucleotide sequence that is at least 95% identical to a sequence of at least 50 contiguous nucleotides in a sequence selected from the group consisting of: a nucleotide sequence of SEQ ID NO:X or the complementary strand thereto; the nucleotide sequence as defined in column 5 of Table 1A or columns 8 and 9 of Table 2 or the complementary strand thereto; and a nucleotide sequence of the cDNA contained in Clone ID NO:Z.

[0881] The method for identifying the species, tissue or cell type of a biological sample can comprise a step of detecting nucleic acid molecules comprising a nucleotide sequence in a panel of at least two nucleotide sequences, wherein at least one sequence in said panel is at least 95% identical to a sequence of at least 50 contiguous nucleotides in a sequence selected from said group.

[0882] Also preferred is a method for diagnosing in a subject a pathological condition associated with abnormal structure or expression of a nucleotide sequence of SEQ ID NO:X or the complementary strand thereto; the nucleotide sequence as defined in column 5 of Table 1A or columns 8 and 9 of Table 2 or the complementary strand thereto; or the cDNA contained in Clone ID NO:Z which encodes a protein, wherein the method comprises a step of detecting in a biological sample obtained from said subject nucleic acid molecules, if any, comprising a nucleotide sequence that is at least 95% identical to a sequence of at least 50 contiguous nucleotides in a sequence selected from the group consisting of: a nucleotide sequence of SEQ ID NO:X or the complementary strand thereto; the nucleotide sequence as defined in column 5 of Table 1A or columns 8 and 9 of Table 2 or the complementary strand thereto; and a nucleotide sequence of cDNA contained in Clone ID NO:Z.

[0883] The method for diagnosing a pathological condition can comprise a step of detecting nucleic acid molecules comprising a nucleotide sequence in a panel of at least two nucleotide sequences, wherein at least one sequence in said panel is at least 95% identical to a sequence of at least 50 contiguous nucleotides in a sequence selected from said group.

[0884] Also preferred is a composition of matter comprising isolated nucleic acid molecules wherein the nucleotide sequences of said nucleic acid molecules comprise a panel of at least two nucleotide sequences, wherein at least one sequence in said panel is at least 95% identical to a sequence of at least 50 contiguous nucleotides in a sequence selected from the group consisting of: a nucleotide sequence of SEQ ID NO:X or the complementary strand thereto; the nucleotide sequence as defined in column 5 of Table 1A or columns 8 and 9 of Table 2 or the complementary strand thereto; and a nucleotide sequence encoded by cDNA contained in Clone ID NO:Z. The nucleic acid molecules can comprise DNA molecules or RNA molecules.

[0885] Also preferred is a composition of matter comprising isolated nucleic acid molecules wherein the nucleotide sequences of said nucleic acid molecules comprise a DNA microarray or “chip” of at least 1, 2, 3, 4, 5, 6, 7, 8, 9, 10, 15, 20, 25, 30, 40, 50, 100, 150, 200, 250, 300, 500, 1000, 2000, 3000, or 4000 nucleotide sequences, wherein at least one sequence in said DNA microarray or “chip” is at least 95% identical to a sequence of at least 50 contiguous nucleotides in a sequence selected from the group consisting of: a nucleotide sequence of SEQ ID NO:X wherein X is any integer as defined in Table 1A; and a nucleotide sequence encoded by a human cDNA clone identified by a cDNA “Clone ID” in Table 1A.

[0886] Also preferred is an isolated polypeptide comprising an amino acid sequence at least 90% identical to a sequence of at least about 10 contiguous amino acids in the polypeptide sequence of SEQ ID NO:Y; a polypeptide encoded by SEQ ID NO:X or the complementary strand thereto; the polypeptide encoded by the nucleotide sequence as defined in columns 8 and 9 of Table 2; and/or a polypeptide encoded by cDNA contained in Clone ID NO:Z.

[0887] Also preferred is an isolated polypeptide comprising an amino acid sequence at least 95% identical to a sequence of at least about 30 contiguous amino acids in the amino acid sequence of SEQ ID NO:Y; a polypeptide encoded by SEQ ID NO:X or the complementary strand thereto; the polypeptide encoded by the nucleotide sequence as defined in columns 8 and 9 of Table 2; and/or a polypeptide encoded by cDNA contained in Clone ID NO:Z.

[0888] Further preferred is an isolated polypeptide comprising an amino acid sequence at least 95% identical to a sequence of at least about 100 contiguous amino acids in the amino acid sequence of SEQ ID NO:Y; a polypeptide encoded by SEQ ID NO:X or the complementary strand thereto; the polypeptide encoded by the nucleotide sequence: as defined in columns 8 and 9 of Table 2; and/or a polypeptide encoded by cDNA contained in Clone ID NO:Z.

[0889] Further preferred is an isolated polypeptide comprising an amino acid sequence at least 95% identical to the complete amino acid sequence of SEQ ID NO:Y; a polypeptide encoded by SEQ ID NO:X or the complementary strand thereto; the polypeptide encoded by the nucleotide sequence as defined in columns 8 and 9 of Table 2; and/or a polypeptide encoded by cDNA contained in Clone ID NO:Z.

[0890] Further preferred is an isolated polypeptide comprising an amino acid sequence at least 90% identical to a sequence of at least about 10 contiguous amino acids in the complete amino acid sequence of a polypeptide encoded by contained in Clone ID NO:Z

[0891] Also preferred is a polypeptide wherein said sequence of contiguous amino acids is included in the amino acid sequence of a portion of said polypeptide encoded by cDNA contained in Clone ID NO:Z; a polypeptide encoded by SEQ ID NO:X or the complementary strand thereto; the polypeptide encoded by the nucleotide sequence as defined in columrs 8 and 9 of Table 2; and/or the polypeptide sequence of SEQ ID NO:Y.

[0892] Also preferred is an isolated polypeptide comprising an amino acid sequence at least 95% identical to a sequence of at least about 30 contiguous amino acids in the amino acid sequence of a polypeptide encoded by the cDNA contained in Clone ID NO:Z.

[0893] Also preferred is an isolated polypeptide comprising an amino acid sequence at least 95% identical to a sequence of at least about 100 contiguous amino acids in the amino acid sequence of a polypeptide encoded by cDNA contained in Clone ID NO:Z.

[0894] Also preferred is an isolated polypeptide comprising an amino acid sequence at least 95% identical to the amino acid sequence of a polypeptide encoded by the cDNA contained in Clone ID NO:Z.

[0895] Further preferred is an isolated antibody which binds specifically to a polypeptide comprising an amino acid sequence that is at least 90% identical to a sequence of at least 10 contiguous amino acids in a sequence selected from the group consisting of: a polypeptide sequence of SEQ ID NO:Y; a polypeptide encoded by SEQ ID NO:X or the complementary strand thereto; the polypeptide encoded by the nucleotide sequence as defined in columns 8 and 9 of Table 2; and a polypeptide encoded by the cDNA contained in Clone ID NO:Z.

[0896] Further preferred is a method for detecting in a biological sample a polypeptide comprising an amino acid sequence which is at least 90% identical to a sequence of at least 10 contiguous amino acids in a sequence selected from the group consisting of: a polypeptide sequence of SEQ ID NO:Y; a polypeptide encoded by SEQ ID NO:X or the complementary strand thereto; the polypeptide encoded by the nucleotide sequence as defined in columns 8 and 9 of Table 2; and a polypeptide encoded by the cDNA contained in Clone ID NO:Z; which method comprises a step of comparing an amino acid sequence of at least one polypeptide molecule in said sample with a sequence selected from said group and determining whether the sequence of said polypeptide molecule in said sample is at least 90% identical to said sequence of at least 10 contiguous amino acids.

[0897] Also preferred is the above method wherein said step of comparing an amino acid sequence of at least one polypeptide molecule in said sample with a sequence selected from said group comprises determining the extent of specific binding of polypeptides in said sample to an antibody which binds specifically to a polypeptide comprising an amino acid sequence that is at least 90% identical to a sequence of at least 10 contiguous amino acicLs in a sequence selected from the group consisting of: a polypeptide sequence of SEQ ID NO:Y; a polypeptide encoded by SEQ ID NO:X or the complementary strand thereto; the polypeptide encoded by the nucleotide sequence as defined in columns 8 and 9 of Table 2; and a polypeptide encoded by the cDNA contained in Clone ID NO:Z.

[0898] Also preferred is the above method wherein said step of comparing sequences is performed by comparing the amino acid sequence determined from a polypeptide molecule in said sample with said sequence selected from said group.

[0899] Also preferred is a method for identifying the species, tissue or cell type of a biological sample which method comprises a step of detecting polypeptide molecules in said sample, if any, comprising an amino acid sequence that is at least 90% identical to a sequence of at least 10 contiguous amino acids in a sequence selected from the group consisting of: polypeptide sequence of SEQ ID NO:Y; a polypeptide encoded by SEQ ID NO:X or the complementary strand thereto; the polypeptide encoded by the nucleotide sequence: as defined in columns 8 and 9 of Table 2; and a polypeptide encoded by the cDNA contained in Clone ID NO:Z.

[0900] Also preferred is the above method for identifying the species, tissue or cell type of a biological sample, which method comprises a step of detecting polypeptide molecules comprising an amino acid sequence in a panel of at least two amino acid sequences, wherein at least one sequence in said panel is at least 90% identical to a sequence of at least 10 contiguous amino acids in a sequence selected from the above group.

[0901] Also preferred is a method for diagnosing in a subject a pathological condition associated with abnormal structure or expression of a nucleic acid sequence identified in Table 1A or Table 2 encoding a polypeptide, which method comprises a step of detecting in a biological sample obtained from said subject polypeptide molecules comprising an amino acid sequence in a panel of at least two amino acid sequences, wherein at least one sequence in said panel is at least 90% identical to a sequence of at least 10 contiguous amino acids in a sequence selected from the group consisting of: polypeptide sequence of SEQ ID NO:Y; a polypeptide encoded by SEQ ID NO:X or the complementary strand thereto; the polypeptide encoded by the nucleotide sequence as defined in columns 8 and 9 of Table 2; and a polypeptide encoded by the cDNA contained in Clone ID NO:Z.

[0902] In any of these methods, the step of detecting said polypeptide molecules includes using an antibody.

[0903] Also preferred is an isolated nucleic acid molecule comprising a nucleotide sequence which is at least 95% identical to a nucleotide sequence encoding a polypeptide wherein said polypeptide comprises an amino acid sequence that is at least 90% identical to a sequence of at least 10 contiguous amino acids in a sequence selected from the group consisting of: polypeptide sequence of SEQ ID NO:Y; a polypeptide encoded by SEQ ID NO:X or the complementary strand thereto; the polypeptide encoded by the nucleolide sequence as defined in columns 8 and 9 of Table 2; and a polypeptide encoded by the cDNA contained in Clone ID NO:Z.

[0904] Also preferred is an isolated nucleic acid molecule, wherein said nucleotide sequence encoding a polypeptide has been optimized for expression of said polypeptide in a prokaryotic host.

[0905] Also preferred is a polypeptide molecule, wherein said polypeptide comprises an amino acid sequence selected from the group consisting of: polypeptide sequence of SEQ ID NO:Y; a polypeptide encoded by SEQ ID NO:X or the complementary strand thereto; the polypeptide encoded by the nucleotide sequence as defined in columns 8 and 9 of Table 2; and a polypeptide encoded by the cDNA contained in Clone ID NO:Z.

[0906] Further preferred is a method of making a recombinant vector comprising inserting any of the above isolated nucleic acid molecule into a vector. Also preferred is the recombinant vector produced by this method. Also preferred is a method of making a recombinant host cell comprising introducing the vector into a host cell, as well as the recombinant host cell produced by this method.

[0907] Also preferred is a method of making an isolated polypeptide comprising culturing this recombinant host cell under conditions such that said polypeptide is expressed and recovering said polypeptide. Also preferred is this method of making an isolated polypeptide, wherein said recombinant host cell is a eukaryotic cell and said polypeptide is a human protein comprising an amino acid sequence selected from the group consisting of: polypeptide sequence of SEQ ID NO:Y; a polypeptide encoded by SEQ ID NO:X or the complementary strand thereto; the polypeptide encoded by the nucleotide sequence as defined in columns 8 and 9 of Table 2; and a polypeptide encoded by the cDNA contained in Clone ID NO:Z. The isolated polypeptide produced by this method is also preferred.

[0908] Also preferred is a method of treatment of an individual in need of an increased level of a protein activity, which method comprises administering to such an individual a Therapeutic comprising an amount of an isolated polypeptide, polynucleotide, immunogenic fragment or analogue thereof, binding agent, antibody, or antigen binding fragment of the claimed invention effective to increase the level of said protein activity in said individual.

[0909] Also preferred is a method of treatment of an individual in need of a decreased level of a protein activity, which method comprised administering to such an individual a Therapeutic comprising an amount of an isolated polypeptide, polynucleotide, immunogenic fragment or analogue thereof, binding agent, antibody, or antigen binding fragment of the claimed invention effective to decrease the level of said protein activity in said individual.

[0910] Also preferred is a method of treatment of an individual in need of a specific delivery of toxic compositions to diseased cells (e.g., tumors, leukemias or lymphomas), which method comprises administering to such an individual a Therapeutic comprising an amount of an isolated polypeptide of the invention, including, but not limited to a binding agent, or antibody of the claimed invention that are associated with toxin or cytotoxic prodrugs.

[0911] Having generally described the invention, the same will be more readily understood by reference to the following examples, which are provided by way of illustration and are not intended as limiting.

TABLE 6

| ATCC Deposits | Deposit Date | ATCC Designation Number |
|---|---|---|
| LP01, LP02, LP03, LP04, | May-20-97 | 209059, 209060, 209061, |
| LP05, LP06, LP07, LP08, | | 209062, 209063, 209064, |
| LP09, LP10, LP11, | | 209065, 209066, 209067, |
| | | 209068, 209069 |
| LP12 | Jan-12-98 | 209579 |
| LP13 | Jan-12-98 | 209578 |
| LP14 | Jul-16-98 | 203067 |
| LP15 | Jul-16-98 | 203068 |
| LP16 | Feb-1-99 | 203609 |
| LP17 | Feb-1-99 | 203610 |
| LP20 | Nov-17-98 | 203485 |
| LP21 | Jun-18-99 | PTA-252 |
| LP22 | Jun-18-99 | PTA-253 |
| LP23 | Dec-22-99 | PTA-1081 |
| PA107 | Mar-24-00 | PTA-1554 |

### EXAMPLES

### Example 1

### Isolation of a Selected cDNA Clone From the Deposited Sample

[0912] Each Clone ID NO:Z is contained in a plasmid vector. Table 7 identifies the vectors used to construct the cDNA library from which each clone was isolated. In many cases, the vector used to construct the library is a phage vector from which a plasmid has been excised. The following correlates the related plasmid for each phage vector used in constructing the cDNA library. For example, where a particular clone is identified in Table 7 as being isolated in the vector “Lambda Zap,” the corresponding deposited clone is in “pBluescript.”

| Vector Used to Construct Library | Corresponding Deposited Plasmid |
|---|---|
| Lambda Zap | pBluescript (pBS) |
| Uni-Zap XR | pBluescript (pBS) |
| Zap Express | pBK |
| lafmid BA | plafmid BA |
| pSport1 | pSport1 |
| pCMVSport 2.0 | pCMVSport 2.0 |
| pCMVSport 3.0 | pCMVSport 3.0 |
| pCR ® 2.1 | pCR ® 2.1 |

[0913] Vectors Lambda Zap (U.S. Pat. Nos. 5,128,256 and 5,286,636), Uni-Zap XR (U.S. Pat. Nos. 5,128, 256 and 5,286,636), Zap Express (U.S. Pat. Nos. 5,128,256 and 5,286,636), pBluescript (pBS) (Short, J. M. et al., Nucleic Acids Res. 16:7583-7600 (1988); Alting-Mees, M. A. and Short, J. M., Nucleic Acids Res. 17:9494 (1989)) and pBK (Alting-Mees, M. A. et al., Strategies 5:58-61 (1992)) are commercially available from Stratagene Cloning Systems, Inc., 11011 N. Torrey Pines Road, La Jolla, Calif., 92037. pBS contains an ampicillin resistance gene and pBK contains a neomycin resistance gene. Both can be transformed into E. coli strain XL-1 Blue, also available from Stratagene. pBS comes in 4 forms SK+, SK-, KS+and KS. The S and K refers to the orientation of the polylinker to the T7 and T3 primer sequences which flank the polylinker region (“S” is for SacI and “K” is for KpnI which are the first sites on each respective end of the linker). “+” or “−” refer to the orientation of the fl origin of replication (“ori”), such that in one orientation, single stranded rescue initiated from the f1 ori generates sense strand DNA and in the other, antisense.

[0914] Vectors pSport1, pCMVSport 2.0 and pCMVSport 3.0, were obtained from Life Technologies, Inc., P. O. Box 6009, Gaithersburg, Md. 20897. All Sport vectors contain an ampicillin resistance gene and may be transformed into E. coli strain DH10B, also available from Life Technologies. (See, for instance, Gruber, C. E., et al., Focus 15:59 (1993)). Vector lafmid BA (Bento Soares, Columbia University, NY) contains an ampicillin resistance gene and can be transformed into E. coli strain XL-1 Blue. Vector pCR®2.1, which is available from Invitrogen, 1600 Faraday Avenue, Carlsbad, Calif. 92008, contains an ampicillin resistance gene and may be transformed into E. coli strain DH 10B, available from Life Technologies. (See, for instance, Clark, J. M., Nuc. Acids Res. 16:9677-9686 (1988) and Mead, D. et al., Bio/Technology 9: (1991)). Preferably, a polynucleotide of the present invention does not comprise the phage vector sequences identified for the particular clone in Table 7, as well as the corresponding plasmid vector sequences designated above.

[0915] The deposited material in the sample assigned the ATCC Deposit Number cited by reference to Tables 1A, 2, 6 and 7 for any given cDNA clone also may contain one or more additional plasmids, each comprising a cDNA clone different from that given clone. Thus, deposits sharing the same ATCC Deposit Number contain at least a plasmid for each Clone ID NO:Z.

TABLE 7

| | | | ATCC |
|---|---|---|---|
| Libraries owned by Catalog | Catalog Description | Vector | deposit |
| HUKA HUKB HUKC HUKD | Human Uterine Cancer | Lambda ZAP II | LP01 |
| HUKE HUKF HUKG | | | |
| HCNA HCNB | Human Colon | Lambda Zap II | LP01 |
| HFFA | Human Fetal Brain, random primed | Lambda Zap II | LP01 |
| HTWA | Resting T-Cell | Lambda ZAP II | LP01 |
| HBQA | Early Stage Human Brain, random | Lambda ZAP II | LP01 |
| | primed | | |
| HLMB HLMF HLMG HLMH | breast lymph node CDNA library | Lambda ZAP II | LP01 |
| HLMI HLMJ HLMM HLMN | | | |
| HCQA HCQB | human colon cancer | Lamda ZAP II | LP01 |
| HMEA HMEC HMED HMEE | Human Microvascular Endothelial | Lambda ZAP II | LP01 |
| HMEF HMEG HMEI HMEJ | Cells, fract. A | | |
| HMEK HMEL | | | |
| HUSA HUSC | Human Umbilical Vein Endothelial | Lambda ZAP II | LP01 |
| | Cells, fract. A | | |
| HLQA HLQB | Hepatocellular Tumor | Lambda ZAP II | LP01 |
| HHGA HHGB HHGC HHGD | Hemangiopericytoma | Lambda ZAP II | LP01 |
| HSDM | Human Striatum Depression, re-rescue | Lambda ZAP II | LP01 |
| HUSH | H Umbilical Vein Endothelial Cells, | Lambda ZAP II | LP01 |
| | frac A, re-excision | | |
| HSGS | Salivary gland, subtracted | Lambda ZAP II | LP01 |
| HFXA HFXB HFXC HFXD | Brain frontal cortex | Lambda ZAP II | LP01 |
| HFXE HFXF HFXG HFXH | | | |
| HPQA HPQB HPQC | PERM TF274 | Lambda ZAP II | LP01 |
| HFXJ HFXK | Brain Frontal Cortex, re-excision | Lambda ZAP II | LP01 |
| HCWA HCWB HCWC HCWD | CD34 positive cells (Cord Blood) | ZAP Express | LP02 |
| HCWE HCWF HCWG HCWH | | | |
| HCWI HCWJ HCWK | | | |
| HCUA HCUB HCUC | CD34 depleted Buffy Coat (Cord | ZAP Express | LP02 |
| | Blood) | | |
| HRSM | A-14 cell line | ZAP Express | LP02 |
| HRSA | A1-CELL LINE | ZAP Express | LP02 |
| HCUD HCUE HCUF HCUG | CD34 depleted Buffy Coat (Cord | ZAP Express | LP02 |
| HCUH HCUI | Blood), re-excision | | |
| HBXE HBXF HBXG | H. Whole Brain #2, re-excision | ZAP Express | LP02 |
| HRLM | L8 cell line | ZAP Express | LP02 |
| HBXA HBXB HBXC HBXD | Human Whole Brain #2 - Oligo dT > | ZAP Express | LP02 |
| | 1.5Kb | | |
| HUDA HUDB HUDC | Testes | ZAP Express | LP02 |
| HHTM HHTN HHTO | H. hypothalamus, frac A;re-excision | ZAP Express | LP02 |
| HHTL | H. hypothalamus, frac A | ZAP Express | LP02 |
| HASA HASD | Human Adult Spleen | Uni-ZAP XR | LP03 |
| HFKC HFKD HFKE HFKF | Human Fetal Kidney | Uni-ZAP XR | LP03 |
| HFKG | | | |
| HE8A HE8B HE8C HE8D HE8E | Human 8 Week Whole Embryo | Uni-ZAP XR | LP03 |
| HE8F HE8M HE8N | | | |
| HGBA HGBD HGBE HGBF | Human Gall Bladder | Uni-ZAP XR | LP03 |
| HGBG HGBH HGBI | | | |
| HLHA HLHB HLHC HLHD | Human Fetal Lung III | Uni-ZAP XR | LP03 |
| HLHE HLHF HLHG HLHH | | | |
| HLHQ | | | |
| HPMA HPMB HPMC HPMD | Human Placenta | Uni-ZAP XR | LP03 |
| HPME HPMF HPMG HPMH | | | |
| HPRA HPRB HPRC HPRD | Human Prostate | Uni-ZAP XR | LP03 |
| HSIA HSIC HSID HSIE | Human Adult Small Intestine | Uni-ZAP XR | LP03 |
| HTEA HTEB HTEC HTED | Human Testes | Uni-ZAP XR | LP03 |
| HTEE HTEF HTEG HTEH HTEI | | | |
| HTEJ HTEK | | | |
| HTPA HTPB HTPC HTPD | Human Pancreas Tumor | Uni-ZAP XR | LP03 |
| HTPE | | | |
| HTTA HTTB HTTC HTTD | Human Testes Tumor | Uni-ZAP XR | LP03 |
| HTTE HTTF | | | |
| HAPA HAPB HAPC HAPM | Human Adult Pulmonary | Uni-ZAP XR | LP03 |
| HETA HETB HETC HETD | Human Endometrial Tumor | Uni-ZAP XR | LP03 |
| HETE HETF HETG HETH HETI | | | |
| HHFB HHFC HHFD HHFE | Human Fetal Heart | Uni-ZAP XR | LP03 |
| HHFF HHFG HHFH HHFI | | | |
| HHPB HHPC HHPD HHPE | Human Hippocampus | Uni-ZAP XR | LP03 |
| HHPF HHPG HHPH | | | |
| HCE1 HCE2 HCE3 HCE4 HCE5 | Human Cerebellum | Uni-ZAP XR | LP03 |
| HCEB HCEC HCED HCEE | | | |
| HCEF HCEG | | | |
| HUVB HUVC HUVD HUVE | Human Umbilical Vein, Endo. remake | Uni-ZAP XR | LP03 |
| HSTA HSTB HSTC HSTD | Human Skin Tumor | Uni-ZAP XR | LP03 |
| HTAA HTAB HTAC HTAD | Human Activated T-CeIls | Uni-ZAP XR | LP03 |
| HTAE | | | |
| HFEA HFEB HFEC | Human Fetal Epithelium (Skin) | Uni-ZAP XR | LP03 |
| HJPA HJPB HJPC HJPD | HUMAN JURKAT MEMBRANE | Uni-ZAP XR | LP03 |
| | BOUND POLYSOMES | | |
| HESA | Human epithelioid sarcoma | Uni-Zap XR | LP03 |
| HLTA HLTB HLTC HLTD | Human T-Cell Lymphoma | Uni-ZAP XR | LP03 |
| HLTE HLTF | | | |
| HFTA HFTB HFTC HFTD | Human Fetal Dura Mater | Uni-ZAP XR | LP03 |
| HRDA HRDB HRDC HRDD | Human Rhabdomyosarcoma | Uni-ZAP XR | LP03 |
| HRDE HRDF | | | |
| HCAA HCAB HCAC | Cem cells cyclohexamide treated | Uni-ZAP XR | LP03 |
| HRGA HRGB HRGC HRGD | Raji Cells, cyclohexamide treated | Uni-ZAP XR | LP03 |
| HSUA HSUB HSUC HSUM | Supt Cells, cyclohexamide treated | Uni-ZAP XR | LP03 |
| HT4A HT4C HT4D | Activated T-Cells, 12 hrs. | Uni-ZAP XR | LP03 |
| HE9A HE9B HE9C HE9D HE9E | Nine Week Old Early Stage Human | Uni-ZAP XR | LP03 |
| HE9F HE9G HE9H HE9M | | | |
| HE9N | | | |
| HATA HATB HATC HATD | Human Adrenal Gland Tumor | Uni-ZAP XR | LP03 |
| HATE | | | |
| HT5A | Activated T-Cells, 24 hrs. | Uni-ZAP XR | LP03 |
| HFGA HFGM | Human Fetal Brain | Uni-ZAP XR | LP03 |
| HNEA HNEB HNEC HNED | Human Neutrophil | Uni-ZAP XR | LP03 |
| HNEE | | | |
| HBGB HBGD | Human Primary Breast Cancer | Uni-ZAP XR | LP03 |
| HBNA HBNB | Human Normal Breast | Uni-ZAP XR | LP03 |
| HCAS | Cem Cells, cyclohexamide treated, | Uni-ZAP XR | LP03 |
| | subtra | | |
| HHPS | Human Hippocampus, subtracted | pBS | LP03 |
| HKCS HKCU | Human Colon Cancer, subtracted | pBS | LP03 |
| HRGS | Raji cells, cyclohexamide treated, | pBS | LP03 |
| | subtracted | | |
| HSUT | Supt cells, cyclohexamide treated, | pBS | LP03 |
| | differentially expressed | | |
| HT4S | Activated T-Cells, 12 hrs, subtracted | Uni-ZAP XR | LP03 |
| HCDA HCDB HCDC HCDD | Human Chondrosarcoma | Uni-ZAP XR | LP03 |
| HCDE | | | |
| HOAA HOAB HOAC | Human Osteosarcoma | Uni-ZAP XR | LP03 |
| HTLA HTLB HTLC HTLD | Human adult testis, large inserts | Uni-ZAP XR | LP03 |
| HTLE HTLF | | | |
| HLMA HLMC HLMD | Breast Lymph node cDNA library | Uni-ZAP XR | LP03 |
| H6EA H6EB H6EC | HL-60, PMA 4H | Uni-ZAP XR | LP03 |
| HTXA HTXB HTXC HTXD | Activated T-Cell (12 hs)/Thiouridine | Uni-ZAP XR | LP03 |
| HTXE HTXF HTXG HTXH | labelledEco | | |
| HNFA HNFB HNFC HNFD | Human Neutrophil, Activated | Uni-ZAP XR | LP03 |
| HNFE HNFF HNFG HNFH | | | |
| HNFJ | | | |
| HTOB HTOC | HUMAN TONSILS, FRACTION 2 | Uni-ZAP XR | LP03 |
| HMGB | Human OB MG63 control fraction I | Uni-ZAP XR | LP03 |
| HOPB | Human OB HOS control fraction I | Uni-ZAP XR | LP03 |
| HORB | Human OB HOS treated (10 nM E2) | Uni-ZAP XR | LP03 |
| | fraction I | | |
| HSVA HSVB HSVC | Human Chronic Synovitis | Uni-ZAP XR | LP03 |
| HROA | HUMAN STOMACH | Uni-ZAP XR | LP03 |
| HBJA HBJB HBJC HBJD HBJE | HUMAN B CELL LYMPHOMA | Uni-ZAP XR | LP03 |
| HBJF HBJG HBJH HBJI HBJJ | | | |
| HBJK | | | |
| HCRA HCRB HCRC | human corpus colosum | Uni-ZAP XR | LP03 |
| HODA HODB HODC HODD | human ovarian cancer | Uni-ZAP XR | LP03 |
| HDSA | Dermatofibrosarcoma Protuberance | Uni-ZAP XR | LP03 |
| HMWA HMWB HMWC HMWD | Bone Marrow Cell Line (RS4;11) | Uni-ZAP XR | LP03 |
| HMWE HMWF HMWG HMWH | | | |
| HMWI HMWJ | | | |
| HSOA | stomach cancer (human) | Uni-ZAP XR | LP03 |
| HERA | SKIN | Uni-ZAP XR | LP03 |
| HMDA | Brain-medulloblastoma | Uni-ZAP XR | LP03 |
| HGLA HGLB HGLD | Glioblastoma | Uni-ZAP XR | LP03 |
| HEAA | H. Atrophic Endometrium | Uni-ZAP XR | LP03 |
| HBCA HBCB | H. Lymph node breast Cancer | Uni-ZAP XR | LP03 |
| HPWT | Human Prostate BPH, re-excision | Uni-ZAP XR | LP03 |
| HFVG HFVH HFVI | Fetal Liver, subtraction II | pBS | LP03 |
| HNFI | Human Neutrophils, Activated, re- | pBS | LP03 |
| | excision | | |
| HBMB HBMC HBMD | Human Bone Marrow, re-excision | pBS | LP03 |
| HKML HKMM HKMN | H. Kidney Medulla, re-excision | pBS | LP03 |
| UKIX HKIY | H. Kidney Cortex, subtracted | pBS | LP03 |
| HADT | H. Amygdala Depression, subtracted | pBS | LP03 |
| H6AS | HI-60, untreated, subtracted | Uni-ZAP XR | LP03 |
| H6ES | HL-60, PMA 4H, subtracted | Uni-ZAP XR | LP03 |
| H6BS | HL-60, PA 4h, Subtracted | Uni-ZAP XR | LP03 |
| H6CS | HL-60, PMA id, subtracted | Uni-ZAP XR | LP03 |
| HTXJ HTXK | Activated T-cell(12h)/Thiouridine-re- | Uni-ZAP XR | LP03 |
| | excision | | |
| HMSA HMSB HMSC HMSD | Monocyte activated | Uni-ZAP XR | LP03 |
| HMSE HMSF HMSG HMSH | | | |
| HMSI HMSJ HMSK | | | |
| HAGA HAGB HAGC HAGD | Human Amygdala | Uni-ZAP XR | LP03 |
| HAGE HAGF | | | |
| HSRA HSRB HSRE | STROMAL-OSTEOCLASTOMA | Uni-ZAP XR | LP03 |
| HSRD HSRF HSRG HSRH | Human Osteoclastoma Stromal Cells - | Uni-ZAP XR | LP03 |
| | unamplified | | |
| HSQA HSQB HSQC HSQD | Stromal cell TF274 | Uni-ZAP XR | LP03 |
| HSQE HSQF HSQG | | | |
| HSKA HSKB HSKC HSKD | Smooth muscle, seram treated | Uni-ZAP XR | LP03 |
| HSKE HSKF HSKZ | | | |
| HSLA HSLB HSLC HSLD | Smooth muscle,control | Uni-ZAP XR | LP03 |
| HSLE HSLF HSLG | | | |
| HSDA HSDD HSDE HSDF | Spinal cord | Uni-ZAP XR | LP03 |
| HSDG HSDH | | | |
| HPWS | Prostate-BPH subtracted II | pBS | LP03 |
| HSKW HSKX HSKY | Smooth Muscle- HASTE normalized | pBS | LP03 |
| HFPB HFPC HFPD | H. Frontal cortex,epileptic;re-excision | Uni-ZAP XR | LP03 |
| HSDI HSDJ HSDK | Spinal Cord, re-excision | Uni-ZAP XR | LP03 |
| HSKN HSKO | Smooth Muscle Serum Treated, Norm | pBS | LP03 |
| HSKG HSKH HSKI | Smooth muscle, serum induced,re-exc | pBS | LP03 |
| HFCA HFCB HFCC HFCD | Human Fetal Brain | Uni-ZAP XR | LP04 |
| HFCE HFCF | | | |
| HPTA HPTB HPTD | Human Pituitary | Uni-ZAP XR | LP04 |
| HTHB HTHC HTHD | Human Thymus | Uni-ZAP XR | LP04 |
| HE6B HE6C HE6D HE6E HE6F | Human Whole Six Week Old Embryo | Uni-ZAP XR | LP04 |
| HE6G HE6S | | | |
| HSSA HSSB HSSC HSSD HSSE | Human Synovial Sarcoma | Uni-ZAP XR | LP04 |
| HSSF HSSG HSSH HSSI HSSJ | | | |
| HSSK | | | |
| HE7T | 7 Week Old Early Stage Human, | Uni-ZAP XR | LP04 |
| | subtracted | | |
| HEPA HEPB HEPC | Human Epididymus | Uni-ZAP XR | LP04 |
| HSNA HSNB HSNC HSNM | Human Synovium | Uni-ZAP XR | LP04 |
| HSNN | | | |
| HPFB HPFC HPFD HPFE | Human Prostate Cancer, Stage C | Uni-ZAP XR | LP04 |
| | fraction | | |
| HE2A HE2D HE2E HE2H HE2I | 12 Week Old Early Stage Human | Uni-ZAP XR | LP04 |
| HE2M HE2N HE2O | | | |
| HE2B HE2C HE2F HE2G HE2P | 12 Week Old Early Stage Human, II | Uni-ZAP XR | LP04 |
| HE2Q | | | |
| HPTS HPTT HPTU | Human Pituitary, subtracted | Uni-ZAP XR | LP04 |
| HAUA HAUB HAUC | Amniotic Cells - TNF induced | Uni-ZAP XR | LP04 |
| HAQA HAQB HAQC HAQD | Amniotic Cells - Primary Culture | Uni-ZAP XR | LP04 |
| HWTA HWTB HWTC | wilm's tumor | Uni-ZAP XR | LP04 |
| HBSD | Bone Cancer, re-excision | Uni-ZAP XR | LP04 |
| HSGB | Salivary gland, re-excision | Uni-ZAP XR | LP04 |
| HSJA HSJB HSJC | Smooth muscle-ILb induced | Uni-ZAP XR | LP04 |
| HSXA HSXB HSXC HSXD | Human Substantia Nigra | Uni-ZAP XR | LP04 |
| HSHA HSHB HSHC | Smooth muscle, ILLb induced | Uni-ZAP XR | LP04 |
| HOUA HOUB HOUC HOUD | Adipocytes | Uni-ZAP XR | LP04 |
| HOUE | | | |
| HPWA HPWB HPWC HPWD | Prostate BPH | Uni-ZAP XR | LP04 |
| HPWE | | | |
| HELA HELB HELC HELD | Endothelial cells-control | Uni-ZAP XR | LP04 |
| HELE HELF HELG HELH | | | |
| HEMA HEMB HEMC HEMD | Endothelial-induced | Uni-ZAP XR | LP04 |
| HEME HEMF HEMG HEMH | | | |
| HBIA HBIB HBIC | Human Brain, Striatum | Uni-ZAP XR | LP04 |
| HHSA HHSB HHSC HHSD | Human Hypothalmus,Schizophrenia | Uni-ZAP XR | LP04 |
| HHSE | | | |
| HNGA HNGB HNGC HNGD | neutrophils control | Uni-ZAP XR | LP04 |
| HNGE HNGF HNGG HNGH | | | |
| HNGI HNGJ | | | |
| HNHA HNHB HNHC HNHD | Neutrophils IL-1 and LPS induced | Uni-ZAP XR | LP04 |
| HNHE HNHF HNHG HNHH | | | |
| HNHI HNHJ | | | |
| HSDB HSDC | STRIATUM DEPRESSION | Uni-ZAP XR | LP04 |
| HHPT | Hypothalamus | Uni-ZAP XR | LP04 |
| HSAT HSAU HSAV HSAW | Anergic T-cell | Uni-ZAP XR | LP04 |
| HSAX HSAY HSAZ | | | |
| HBMS HBMT HBMU HBMV | Bone marrow | Uni-ZAP XR | LP04 |
| HBMW HBMX | | | |
| HOEA HOEB HOEC HOED | Osteoblasts | Uni-ZAP XR | LP04 |
| HOEE HOEF HOEJ | | | |
| HAIA HAIB HAIC HAID HAIE | Epithelial-TNFa and INF induced | Uni-ZAP XR | LP04 |
| HAIF | | | |
| HTGA HTGB HTGC HTGD | Apoptotic T-cell | Uni-ZAP XR | LP04 |
| HMCA HMCB HMCC HMCD | Macrophage-oxLDL | Uni-ZAP XR | LP04 |
| HMCE | | | |
| HMAA HMAB HMAC HMAD | Macrophage (GM-CSF treated) | Uni-ZAP XR | LP04 |
| HMAE HMAF HMAG | | | |
| HPHA | Normal Prostate | Uni-ZAP XR | LP04 |
| HPIA HPIB HPIC | LNCAP prostate cell line | Uni-ZAP XR | LP04 |
| HPJA HPJB HPJC | PC3 Prostate cell line | Uni-ZAP XR | LP04 |
| HOSE HOSF HOSG | Human Osteoclastoma, re-excision | Uni-ZAP XR | LP04 |
| HTGE HTGF | Apoptotic T-cell, re-excision | Uni-ZAP XR | LP04 |
| HMAJ HMAK | H Macrophage (GM-CSF treated), re- | Uni-ZAP XR | LP04 |
| | excision | | |
| HACB HACC HACD | Human Adipose Tissue, re-excision | Uni-ZAP XR | LP04 |
| HEPA | H. Frontal Cortex, Epileptic | Uni-ZAP XR | LP04 |
| HFAA HFAB HFAC HFAD | Alzheimer's, spongy change | Uni-ZAP XR | LP04 |
| HFAE | | | |
| HFAM | Frontal Lobe, Dementia | Uni-ZAP XR | LP04 |
| HMIA HMIB HMIC | Human Manic Depression Tissue | Uni-ZAP XR | LP04 |
| HTSA HTSE HTSF HTSG | Human Thymus | pBS | LP05 |
| HTSH | | | |
| HPBA HPBB HPBC HPBD | Human Pineal Gland | pBS | LP05 |
| HPBE | | | |
| HSAA HSAB HSAC | HSA 172 Cells | pBS | LP05 |
| HSBA HSBB HSBC HSBM | HSC172 cells | pBS | LP05 |
| HJAA HJAB HJAC HJAD | Jurkat T-cell G1 phase | pBS | LP05 |
| HJBA HJBB HJBC HJBD | Jurkat T-Cell, S phase | pBS | LP05 |
| HAFA HAFB | Aorta endothelial cells + TNF-a | pBS | LP05 |
| HAWA HAWB HAWC | Human White Adipose | pBS | LP05 |
| HTNA HTNB | Human Thyroid | pBS | LP05 |
| HONA | Normal Ovary, Premenopausal | pBS | LP05 |
| HARA HARB | Human Adult Retina | pBS | LP05 |
| HLJA HLJB | Human Lung | pCMVSport 1 | LP06 |
| HOFM HOFN HOFO | H. Ovarian Tumor, II, OV5232 | pCMVSport2.0 | LP07 |
| HOGA HOGB HOGC | OV 10-3-95 | pCMVSport2.0 | LP07 |
| HCGL | CD34 + cells, II | pCMVSport2.0 | LP07 |
| HDLA | Hodgkin's Lymphoma I | pCMVSport2.0 | LP07 |
| HDTA HDTB HDTC HDTD | Hodgkin's Lymphoma II | pCMVSport2.0 | LP07 |
| HDTE | | | |
| HKAA HKAB HKAC HKAD | Keratinocyte | pCMVSport2.0 | LP07 |
| HKAE HKAF HKAG HKAH | | | |
| HCIM | CAPFINDER, Crohn's Disease, lib 2 | pCMVSport2.0 | LP07 |
| HKAL | Keratinocyte, lib 2 | pCMVSport2.0 | LP07 |
| HKAT | Keratinocyte, lib 3 | pCMVSport2.0 | LP07 |
| HNDA | Nasal polyps | pCMVSport2.0 | LP07 |
| HDRA | H. Primary Dendritic Cells,lib 3 | pCMVSport2.0 | LP07 |
| HOHA HOHB HOHC | Human Osteoblasts II | pCMVSport2.0 | LP07 |
| HLDA HLDB HLDC | Liver, Hepatoma | pCMVSport3.0 | LP08 |
| HLDN HLDO HLDP | Human Liver, normal | pCMVSport3.0 | LP08 |
| HMTA | pBMC stimulated w/ poly I/C | pCMVSport3.0 | LP08 |
| HNTA | NTERA2, control | pCMVSport3.0 | LP08 |
| HDPA HDPB HDPC HDPD | Primary Dendritic Cells, lib 1 | pCMVSport3.0 | LP08 |
| HDPF HDPG HDPH HDPI HDPJ | | | |
| HDPK | | | |
| HDPM HDPN HDPO HDPP | Primary Dendritic cells,frac 2 | pCMVSport3.0 | LP05 |
| HMUA HMUB HMUC | Myoloid Progenitor Cell Line | pCMVSport3.0 | LP08 |
| HHEA HHEB HHEC HHED | T Cell helper I | pCMVSport3.0 | LP08 |
| HHEM HHEN HHEO RHEP | T cell helper II | pCMVSport3.0 | LP08 |
| HEQA HEQB HEQC | Human endometrial stromal cells | pCMVSport3.0 | LP08 |
| HJMA HJMB | Human endometrial stromal cells- | pCMVSport3.0 | LP08 |
| | treated with progesterone | | |
| HSWA HSWB HSWC | Human endometrial stromal cells- | pCMVSport3.0 | LP05 |
| | treated with estradiol | | |
| HSYA HSYB HSYC | Human Thymus Stromal Cells | pCMVSport3.0 | LP08 |
| HLWA HLWB HLWC | Human Placenta | pCMVSport3.0 | LP08 |
| HRAA HRAB HRAC | Rejected Kidney, lib 4 | pCMVSport3.0 | LP08 |
| HMTM | PCR, pBMC I/C treated | PCRII | LP09 |
| HMJA | H. Meniingima, M6 | pSport 1 | LP10 |
| HMKA HMKB HMKC HMKD | H. Meningima, M1 | pSport 1 | LP10 |
| HMKE | | | |
| HUSG HUSI | Human umbilical vein endothelial cells, | pSport 1 | LP10 |
| | IL-4 induced | | |
| HUSX HUSY | Human Umbilical Vein Endothelial | pSport 1 | LP10 |
| | Cells, uninduced | | |
| HOFA | Ovarian Tumor I, OV5232 | pSport 1 | LP10 |
| HCFA HCFB HCFC HCFD | T-Cell PHA 16 hrs | pSport 1 | LP10 |
| HCFL HCFM HCFN HCFO | T-Cell PHA 24 hrs | pSport 1 | LP10 |
| HADA HADC HADD HADE | Human Adipose | pSport 1 | LP10 |
| HADF HADG | | | |
| HOVA HOVB HOVC | Human Ovary | pSport 1 | LP10 |
| HTWB HTWC HTWD HTWE | Resting T-Cell Library,II | pSport 1 | LP10 |
| HTWF | | | |
| HMMA | Spleen metastic melanoma | pSport 1 | LP10 |
| HLYA HLYB HLYC HLYD | Spleen, Chronic lymphocytic leukemia | pSport 1 | LP10 |
| HLYE | | | |
| HCGA | CD34 + cell, I | pSport 1 | LP10 |
| HEOM HEON | Human Eosinophils | pSport 1 | LP10 |
| HTDA | Human Tonsil, Lib 3 | pSport 1 | LP10 |
| HSPA | Salivary Gland, Lib 2 | pSport 1 | LP10 |
| HCHA HCHB HCHC | Breast Cancer cell line, MDA 36 | pSport 1 | LP10 |
| HCHM HCHN | Breast Cancer Cell line, angiogenic | pSport 1 | LP10 |
| HCIA | Crohn's Disease | pSport 1 | LP10 |
| HDAA HDAB HDAC | HEL cell line | pSport 1 | LP10 |
| HABA | Human Astrocyte | pSport 1 | LP10 |
| HUFA HUFB HUFC | Ulcerative Colitis | pSport 1 | LP10 |
| HNTM | NTERA2 + retinoic acid, 14 days | pSport 1 | LP10 |
| HDQA | Primary Dendritic cells,CapFinder2, | pSport 1 | LP10 |
| | frac 1 | | |
| HDQM | Primary Dendritic Cells, CapFinder, | pSport 1 | LP10 |
| | frac 2 | | |
| HLDX | Human Liver, normal,CapFinder | pSport 1 | LP10 |
| HULA HULB HULC | Human Dennal Endothelial | pSport 1 | LP10 |
| | Cells,untreated | | |
| HUMA | Human Dermal Endothelial cells,treated | pSport 1 | LP10 |
| HCJA | Human Stromal Endometrial | pSport 1 | LP10 |
| | fibroblasts, untreated | | |
| HCJM | Human Stromal endometrial fibroblasts, | pSport 1 | LP10 |
| | treated w/estradiol | | |
| HEDA | Human Stromal endometrial fibroblasts, | pSport 1 | LPI0 |
| | treated with progesterone | | |
| HFNA | Human ovary tumor cell OV350721 | pSport 1 | LP10 |
| HKGA HKGB HKGC HKGD | Merkel Cells | pSport 1 | LP10 |
| HISA HISB HISC | Pancreas Islet Cell Tumor | pSport 1 | LP10 |
| HLSA | Skin, burned | pSport 1 | LP10 |
| HBZA | Prostate,BPH, Lib 2 | pSport 1 | LP10 |
| HBZS | Prostate BPH,Lib 2, subtracted | pSport 1 | LP10 |
| HFIA HFIB HFIC | Synovial Fibroblasts (control) | pSport 1 | LP10 |
| HFIH HFII HFIJ | Synovial hypoxia | pSport 1 | LP10 |
| HFIT HFIU HFIV | Synovial IL-1/TNF stimulated | pSport 1 | LP10 |
| HGCA | Messangial cell, frac 1 | pSport 1 | LP10 |
| HMVA HMVB HMVC | Bone Marrow Stromal Cell, untreated | pSport 1 | LP10 |
| HFIX HFIY HFIZ | Synovial Fibroblasts (Il1/TNF), subt | pSport 1 | LP10 |
| HFOX HFOY HFOZ | Synovial hypoxia-RSF subtracted | pSport 1 | LP10 |
| HMQA HMQB HMQC HMQD | Human Activated Monocytes | Uni-ZAP XR | LPI I |
| HLIA HLIB HLIC | Human Liver | pCMVSport 1 | LP012 |
| HHBA HHBB HHBC HHBD | Human Heart | pCMVSport 1 | LP012 |
| HHBE | | | |
| HBBA HBBB | Human Brain | pCMVSport 1 | LP012 |
| HLJA HLJB HLJC HLJD HLJE | Human Lung | pCMVSport 1 | LP012 |
| HOGA HOGB HOGC | Ovarian Tumor | pCMVSport2.0 | LP012 |
| HTJM | Human Tonsils, Lib 2 | pCMVSport2.0 | LP012 |
| HAMF HAMG | KMH2 | pCMVSport3.0 | LP012 |
| HAJA HAJB HAJC | L428 | pCMVSport3.0 | LP012 |
| HWBA HWBB HWBC HWBD | Dendritic cells, pooled | pCMVSport3.0 | LP012 |
| HWBE | | | |
| HWAA HWAB HWAC HWAD | Human Bone Marrow, treated | pCMVSport3.0 | LP012 |
| HWAE | | | |
| HYAA HYAB HYAC | B Cell lymphoma | pCMVSport3.0 | LP012 |
| HWHG HWHH HWHI | Healing groin wound, 6.5 hours post | pCMVSport3.0 | LP012 |
| | incision | | |
| HWHP HWHQ HWHR | Healing groin wound; 7.5 hours post | pCMVSport3.0 | LP012 |
| | incision | | |
| HARM | Healing groin wound - zero hr post- | pCMVSport3.0 | LP012 |
| | incision (control) | | |
| HBIM | Olfactory epithelium; nasalcavity | pCMVSport3.0 | LP012 |
| HWDA | Healing Abdomen wound; 70&90 min | pCMVSport3.0 | LP012 |
| | post incision | | |
| HWEA | Healing Abdomen Wound;15 days post | pCMVSport3.0 | LP012 |
| | incision | | |
| HWJA | Healing Abdomen Wound;21&29 days | pCMVSport3.0 | LP012 |
| HNAL | Human Tongue, frac 2 | pSport 1 | LP012 |
| HMJA | H. Meniingima, M6 | pSport 1 | LP012 |
| HMKA HMKB HMKC HMKD | H. Meniingima, M1 | pSport 1 | LP012 |
| HMKE | | | |
| HOFA | Ovarian Tumor I, OV5232 | pSport 1 | LP012 |
| HCFA HCFB HCFC HCFD | T-Cell PHA 16 hrs | pSport 1 | LP012 |
| HCFL HCFM HCFN HCFO | T-Cell PHA 24 hrs | pSport 1 | LP012 |
| HMMA HMMB HMMC | Spleen metastic melanoma | pSport 1 | LP012 |
| HTDA | Human Tonsil, Lib 3 | pSport 1 | LP012 |
| HDBA | Human Fetal Thymus | pSport 1 | LP012 |
| HDUA | Pericardium | pSport 1 | LP012 |
| HBZA | Prostate,BPH, Lib 2 | pSport 1 | LP012 |
| HWCA | Larynx tumor | pSport 1 | LP012 |
| HWKA | Normal lung | pSport 1 | LP012 |
| HSMB | Bone marrow stroma,treated | pSport 1 | LP012 |
| HBHM | Normal trachea | pSport 1 | LP012 |
| HLFC | Human Larynx | pSport 1 | LP012 |
| HLRB | Siebben Polyposis | pSport 1 | LP012 |
| HNIA | Mammary Gland | pSport 1 | LP012 |
| HNJB | Palate carcinoma | pSport 1 | LP012 |
| HNKA | Palate normal | pSport 1 | LP012 |
| HMZA | Pharynx carcinoma | pSport 1 | LP012 |
| HABG | Cheek Carcinoma | pSport 1 | LP012 |
| HMZM | Pharynx Carcinoma | pSport 1 | LP012 |
| HDRM | Larynx Carcinoma | pSport 1 | LP012 |
| HVAA | Pancreas normal PCA4 No | pSport 1 | LP012 |
| HICA | Tongue carcinoma | pSport 1 | LP012 |
| HUKA HUKB HUKC HUKD | Human Uterine Cancer | Lambda ZAP II | LP013 |
| HUKE | | | |
| HFFA | Human Fetal Brain, random primed | Lambda ZAP II | LP013 |
| HTUA | Activated T-cell labeled with 4-thioluri | Lambda ZAP II | LP013 |
| HBQA | Early Stage Human Brain, random | Lambda ZAP II | LP013 |
| | primed | | |
| HMEB | Human microvascular Endothelial cells, | Lambda ZAP II | LP013 |
| | fract. B | | |
| HUSH | Human Umbilical Vein Endothelial | Lambda ZAP II | LP013 |
| | cells, fract. A, re-excision | | |
| HLQC HLQD | Hepatocellular tumor, re-excision | Lambda ZAP II | LP013 |
| HTWJ HTWK HTWL | Resting T-cell, re-excision | Lambda ZAP II | LP013 |
| HF6S | Human Whole 6 week Old Embryo (II), | pBluescript | LP013 |
| | subt | | |
| HHPS | Human Hippocampus, subtracted | pBluescript | LP013 |
| HLIS | LNCAP, differential expression | pBluescript | LP013 |
| HLHS HLHT | Early Stage Human Lung, Subtracted | pBluescript | LP013 |
| HSUS | Supt cells, cyclohexamide treated, | pBluescript | LP013 |
| | subtracted | | |
| HSUT | Supt cells, cyclohexamide treated, | pBluescript | LP013 |
| | differentially expressed | | |
| HSDS | H. Striatum Depression, subtracted | pBluescript | LP013 |
| HPTZ | Human Pituitary, Subtracted VII | pBluescript | LP013 |
| HSDX | H. Striatum Depression, subt II | pBluescript | LP013 |
| HSDZ | H. Striatum Depression, subt | pBluescript | LP013 |
| HPBA HPBB HPBC HPBD | Human Pineal Gland | pBluescript SK- | LP013 |
| HPBE | | | |
| HRTA | Colorectal Tumor | pBluescript SK- | LP013 |
| HSBA HSBB HSBC HSBM | HSC172 cells | pBluescript SK- | LP013 |
| HJAA HJAB HJAC HJAD | Jurkat T-cell G1 phase | pBluescript SK- | LP013 |
| HJBA HJBB HJBC HJBD | Jurkat T-cell, S1 phase | pBluescript SK. | LP013 |
| HTNA HTNB | Human Thyroid | pBluescript SK- | LP013 |
| HAHA HAHB | Human Adult Heart | Uni-ZAP XR | LP013 |
| HE6A | Whole 6 week Old Embryo | Uni-ZAP XR | LP013 |
| HFCA HFCB HFCC HFCD | Human Fetal Brain | Uni-ZAP XR | LP013 |
| HFCE | | | |
| HFKC HFKD HFKE HFKF | Human Fetal Kidney | Uni-ZAP XR | LP013 |
| HFKG | | | |
| HGBA HGBD HGBE HGBF | Human Gall Bladder | Uni-ZAP XR | LP013 |
| HGBG | | | |
| HPRA HPRB HPRC HPRD | Human Prostate | Uni-ZAP XR | LP013 |
| HTEA HTEB HTEC HTED | Human Testes | Uni-ZAP XR | LP013 |
| HTEE | | | |
| HTTA HTTB HTTC HTTD | Human Testes Tumor | Uni-ZAP XR | LP013 |
| HTTE | | | |
| HYBA HYBB | Human Fetal Bone | Uni-ZAP XR | LP013 |
| HFLA | Human Fetal Liver | Uni-ZAP XR | LP013 |
| HHFB HHFC HHFD HHFE | Human Fetal Heart | Uni-ZAP XR | LP013 |
| HHFF | | | |
| HUVB HUVC HUVD HUVE | Human Umbilical Vein, End. remake | Uni-ZAP XR | LP013 |
| HTHB HTHC HTHD | Human Thymus | Uni-ZAP XR | LP013 |
| HSTA HSTB HSTC HSTD | Human Skin Tumor | Uni-ZAP XR | LP013 |
| HTAA HTAB HTAC HTAD | Human Activated T-cells | Uni-ZAP XR | LP013 |
| HTAE | | | |
| HFEA HFEB HFEC | Human Fetal Epithelium (skin) | Uni-ZAP XR | LP013 |
| HJPA HJPB HJPC HJPD | Human Jurkat Membrane Bound | Uni-ZAP XR | LP013 |
| | Polysomes | | |
| HESA | Human Epithelioid Sarcoma | Uni-ZAP XR | LP013 |
| HALS | Human Adult Liver, Subtracted | Uni-ZAP XR | LP013 |
| HFTA HFTB HFTC HFTD | Human Fetal Dura Mater | Uni-ZAP XR | LP013 |
| HCAA HCAB HCAC | Cem cells, cyclohexamide treated | Uni-ZAP XR | LP013 |
| HRGA HRGB HRGC HRGD | Raji Cells, cyclohexamide treated | Uni-ZAP XR | LP013 |
| HE9A HE9B HE9C HE9D HE9E | Nine Week Old Early Stage Human | Uni-ZAP XR | LP013 |
| HSFA | Human Fibrosarcoma | Uni-ZAP XR | LP013 |
| HATA HATB HATC HATD | Human Adrenal Gland Tumor | Uni-ZAP XR | LP013 |
| HATE | | | |
| HTRA | Human Trachea Tumor | Uni-ZAP XR | LP013 |
| HE2A HE2D HE2E HE2H HE2I | 12 Week Old Early Stage Human | Uni-ZAP XR | LP013 |
| HE2B HE2C HE2F HE2G HE2P | 12 Week Old Early Stage Human, II | Uni-ZAP XR | LP013 |
| HNEA HNEB HNEC HNED | Human Neutrophil | Uni-ZAP XR | LP013 |
| HNEE | | | |
| HBGA | Human Primary Breast Cancer | Uni-ZAP XR | LP013 |
| HPTS HPTT HPTU | Human Pituitary, subtracted | Uni-ZAP XR | LP013 |
| HMQA HMQB HMQC HMQD | Human Activated Monocytes | Uni-ZAP XR | LP013 |
| HOAA HOAB HOAC | Human Osteosarcoma | Uni-ZAP XR | LP013 |
| HTOA HTOD HTOE HTOF | human tonsils | Uni-ZAP XR | LP013 |
| HTOG | | | |
| HMGB | Human OB MG63 control fraction I | Uni-ZAP XR | LP013 |
| HOPB | Human OB HOS control fraction I | Uni-ZAP XR | LP013 |
| HOQB | Human OB HOS treated (1 nM E2) | Uni-ZAP XR | LP013 |
| | fraction I | | |
| HAUA HAUB HAUC | Amniotic Cells - TNF induced | Uni-ZAP XR | LP013 |
| HAQA HAQB HAQC HAQD | Amniotic Cells - Primary Culture | Uni-ZAP XR | LP013 |
| HROA HROC | HUMAN STOMACH | Uni-ZAP XR | LP013 |
| HBJA HBJB HBJC HBJD HBJE | HUMAN B CELL LYMPHOMA | Uni-ZAP XR | LP013 |
| HODA HODB HODC HODD | human ovarian cancer | Uni-ZAP XR | LP013 |
| HCPA | Corpus Callosum | Uni-ZAP XR | LP013 |
| HSOA | stomach cancer (human) | Uni-ZAP XR | LP013 |
| HERA | SKIN | Uni-ZAP XR | LP013 |
| HMDA | Brain-medulloblastoma | Uni-ZAP XR | LP013 |
| HGLA HGLB HGLD | Glioblastoma | Uni-ZAP XR | LP013 |
| HWTA HWTB HWTC | wilm's tumor | Uni-ZAP XR | LP013 |
| HEAA | H. Atrophic Endometrium | Uni-ZAP XR | LP013 |
| HAPN HAPO HAPP HAPQ | Human Adult Pulmonary;re-excision | Uni-ZAP XR | LP013 |
| HAPR | | | |
| HLTG HLTH | Human T-cell lymphoma;re-excision | Uni-ZAP XR | LP013 |
| HAHC HAHD HAHE | Human Adult Heart;re-excision | Uni-ZAP XR | LP013 |
| HAGA HAGB HAGC HAGD | Human Amygdala | Uni-ZAP XR | LP013 |
| HAGE | | | |
| HSJA HSJB HSJC | Smooth muscle-ILb induced | Uni-ZAP XR | LP013 |
| HSHA HSHB HSHC | Smooth muscle, IL1b induced | Uni-ZAP XR | LP013 |
| HPWA HPWB HPWC HPWD | Prostate BPH | Uni-ZAP XR | LP013 |
| HPWE | | | |
| HPIA HPIB HPIC | LNCAP prostate cell line | Uni-ZAP XR | LP013 |
| HPJA HPJB HPJC | PC3 Prostate cell line | Uni-ZAP XR | LP013 |
| HBTA | Bone Marrow Stroma, TNF&LPS ind | Uni-ZAP XR | LP013 |
| HMCF HMCG HMCH HMCI | Macrophage-oxLDL; re-excision | Uni-ZAP XR | LP013 |
| HMCJ | | | |
| HAGG HAGH HAGI | Human Amygdala;re-excision | Uni-ZAP XR | LP013 |
| HACA | H. Adipose Tissue | Uni-ZAP XR | LP013 |
| HKFB | K562 + PMA (36 hrs),re-excision | ZAP Express | LP013 |
| HCWT HCWU HCWV | CD34 positive cells (cord blood),re-ex | ZAP Express | LP013 |
| HBWA | Whole brain | ZAP Express | LP013 |
| HBXA HBXB HBXC HBXD | Human Whole Brain #2- Oligo dT > | ZAP Express | LP013 |
| | 1.5Kb | | |
| HAVM | Temporal cortex-Alzheizmer | pT-Adv | LP014 |
| HAVT | Hippocampus, Alzheimer Subtracted | pT-Adv | LP014 |
| HHAS | CHME Cell Line | Uni-ZAP XR | LP014 |
| HAJR | Larynx normal | pSport 1 | LP014 |
| HWLE HWLF HWLG HWLH | Colon Normal | pSport 1 | LP014 |
| HCRM HCRN HCRO | Colon Carcinoma | pSport 1 | LP014 |
| HWLI HWLJ HWLK | Colon Normal | pSport 1 | LP014 |
| HWLQ HWLR HWLS HWLT | Colon Tumor | pSport 1 | LP014 |
| HBFM | Gastrocnemius Muscle | pSport 1 | LP014 |
| HBOD HBOE | Quadriceps Muscle | pSport 1 | LP014 |
| HBKD HBKE | Soleus Muscle | pSport 1 | LP014 |
| HCCM | Pancreatic Langerhans | pSport 1 | LP014 |
| HWGA | Larynx carcinoma | pSport 1 | LP014 |
| HWGM HWGN | Larynx carcinoma | pSport 1 | LP014 |
| HWLA HWLB HWLC | Normal colon | pSport 1 | LP014 |
| HWLM HWLN | Colon Tumor | pSport 1 | LP014 |
| HVAM HVAN HVAO | Pancreas Tumor | pSport 1 | LP014 |
| HWGQ | Larynx carcinoma | pSport 1 | LP014 |
| HAQM HAQN | Salivary Gland | pSport 1 | LP014 |
| HASM | Stomach; normal | pSport 1 | LP014 |
| HBCM | Uterus; normal | pSport 1 | LP014 |
| HCDM | Testis; normal | pSport 1 | LP014 |
| HDJM | Brain; normal | pSport 1 | LP014 |
| HEFM | Adrenal Gland,normal | pSport 1 | LP014 |
| HBAA | Rectum normal | pSport 1 | LP014 |
| HFDM | Rectum tumour | pSport 1 | LP014 |
| HGAM | Colon, normal | pSport 1 | LP014 |
| HHMM | Colon, tumour | pSport 1 | LP014 |
| HCLB HCLC | Human Lung Cancer | Lambda Zap II | LP015 |
| HRLA | L1 Cell line | ZAP Express | LP015 |
| HHAM | Hypothalamus, Alzheimer's | pCMVSport3.0 | LP015 |
| HKBA | Ku 812F Basophils Line | pSport 1 | LP015 |
| HS2S | Saos2, Dexamethosome Treated | pSport 1 | LP016 |
| HA5A | Lung Carcinoma A549 TNFalpha | pSport 1 | LP016 |
| | activated | | |
| HTFM | TF-1 Cell Line GM-CSF Treated | pSport 1 | LP016 |
| HYAS | Thyroid Tumour | pSport 1 | LP016 |
| HUTS | Larynx Normal | pSport 1 | LP016 |
| HXOA | Larynx Tumor | pSport 1 | LP016 |
| HEAH | Ea.hy.926 cell line | pSport 1 | LP016 |
| HINA | Adenocarcinoma Human | pSport 1 | LP016 |
| HRMA | Lung Mesothelium | pSport 1 | LP016 |
| HLCL | Human Pre-Differentiated Adipocytes | Uni-Zap XR | LP017 |
| HS2A | Saos2 Cells | pSport 1 | LP020 |
| H52I | Saos2 Cells; Vitamin D3 Treated | pSport 1 | LP020 |
| HUCM | CHME Cell Line, untreated | pSport 1 | LP020 |
| HEPN | Aryepiglottis Normal | pSport 1 | LP020 |
| HPSN | Sinus Piniformis Tumour | pSport 1 | LP020 |
| HNSA | Stomach Normal | pSport 1 | LP020 |
| HNSM | Stomach Tumour | pSport 1 | LP020 |
| HNLA | Liver Normal Met5No | pSport 1 | LP020 |
| HNTA | Liver Tumour Met 5 Tu | pSport 1 | LP020 |
| HOCN | Colon Normal | pSport 1 | LP020 |
| HOCT | Colon Tumor | pSport 1 | LP020 |
| HTNT | Tongue Tumour | pSport 1 | LP020 |
| HLXN | Larynx Normal | pSport 1 | LP020 |
| HLXT | Larynx Tumour | pSport 1 | LP020 |
| HTYN | Thymus | pSport 1 | LP020 |
| HPLN | Placenta | pSport 1 | LP020 |
| HTNG | Tongue Normal | pSport 1 | LP020 |
| HZAA | Thyroid Normal (SDCA2 No) | pSport 1 | LP020 |
| HWES | Thyroid Thyroiditis | pSport 1 | LP020 |
| HFHD | Ficolled Human Stromal Cells, 5Fu | pTrip1Ex2 | LP021 |
| | treated | | |
| HFHM,HFHN | Ficolled Human Stromal Cells, | pTrip1Ex2 | LP021 |
| | Untreated | | |
| HPCI | Hep G2 Cells, lambda library | lambda Zap-CMV XR | LP021 |
| HBCA,HBCB,HBCC | H. Lymph node breast Cancer | Uni-ZAP XR | LP02l |
| HCOK | Chondrocytes | pSPORT1 | LP022 |
| HDCA, HDCB, HDCC | Dendritic Cells From CD34 Cells | pSPORT1 | LP022 |
| HDMA, HDMB | CD40 activated monocyte dendritic | pSPORT1 | LP022 |
| | cells | | |
| HDDM, HDDN, UDDO | LPS activated derived dendritic cells | pSPORT1 | LP022 |
| HPCR | Hep G2 Cells, PCR library | lambda Zap-CMV XR | LP022 |
| HAAA, HAAB, HAAC | Lung, Cancer (4005313A3): Invasive | pSPORT1 | LP022 |
| | Poorly Differentiated Lung | | |
| | Adenocarcinoma | | |
| HIPA, HIPB, HIPC | Lung, Cancer (4005163 B7): Invasive, | pSPORT1 | LP022 |
| | Poorly Diff. Adenocarcinoma, | | |
| | Metastatic | | |
| HOOH, HOOI | Ovary, Cancer: (4004562 B6) Papillary | pSPORT1 | LP022 |
| | Serous Cystic Neoplasm, Low | | |
| | Malignant Pot | | |
| HIDA | Lung, Normal: (4005313 B1) | pSPORT1 | LP022 |
| HUJA,HUJB,HUJC,HUJD,HUJE | B-Cells | pCMVSport3.0 | LP022 |
| HNOA,HNOB,HNOC,HNOD | Ovary, Normal: (9805C040R) | pSPORT1 | LP022 |
| HNLM | Lung, Normal: (4005313 B1) | pSPORT1 | LP022 |
| HSCL | Stromal Cells | pSPORT1 | LP022 |
| HAAX | Lung, Cancer: (4005313 A3) Invasive | pSPORT1 | LP022 |
| | Poorly-differentiated Metastatic lung | | |
| | adenocarcinoma | | |
| HUUA,HUUB,HUUC,HUUD | B-cells (unstimulated) | pTrip1Ex2 | LP022 |
| HWWA,HWWB,HWWC,HWW | B-cells (stimulated) | pSPORT1 | LP022 |
| D,HWWE,HWWF,HWWG | | | |
| HCCC | Colon, Cancer: (9808C064R) | pCMVSport3.0 | LP023 |
| HPDO HPDP HPDQ HPDR HPD | Ovary, Cancer (9809C332): Poorly | pSport 1 | LP023 |
| | differentiated adenocarcinoma | | |
| HPCO HPCP HPCQ HPCT | Ovary, Cancer (15395A1F): Grade II | pSport 1 | LP023 |
| | Papillary Carcinoma | | |
| HOCM HOCO HOCP HOCQ | Ovary, Cancer: (15799A1F) Poorly | pSport 2 | LP023 |
| | differentiated carcinoma | | |
| HCBM HCBN HCBO | Breast, Cancer: (4004943 A5) | pSport 1 | LP023 |
| HNBT HNBU HNBV | Breast, Normal: (4005522B2) | pSport 1 | LP023 |
| HBCP HBCQ | Breast, Cancer: (4005522 A2) | pSport 1 | LP023 |
| HBCJ | Breast, Cancer: (9806C012R) | pSport 1 | LP023 |
| HSAM HSAN | Stromal cells 3.88 | pSport 1 | LP023 |
| HVCA HVCB HVCC HVCD | Ovary, Cancer: (4004332 A2) | pSport 1 | LP023 |
| HSCK HSEN HSEO | Stromal cells (HBM3.18) | pSport 1 | LP023 |
| HSCP HSCQ | stromal cell clone 2.5 | pSport 1 | LP023 |
| HUXA | Breast Cancer: (4005385 A2) | pSport 1 | LP023 |
| HCOM HCON HCOO HCOP | Ovary, Cancer (4004650 A3): Well- | pSport 1 | LP023 |
| HCOQ | Differentiated Micropapillary Serous | | |
| | Carcinoma | | |
| HBNM | Breast, Cancer: (9802C020E) | pSport 1 | LP023 |
| HVVA HVVB HVVC HVVD | Human Bone Marrow, treated | pSport 1 | LP023 |
| HVVE | | | |

[0916] Two nonlimiting examples are provided below for isolating a particular clone from the deposited sample of plasmid cDNAs cited for that clone in Table 7. First, a plasmid is directly isolated by screening the clones using a polynucleotide probe corresponding to the nucleotide sequence of SEQ ID NO:X.

[0917] Particularly, a specific polynucleotide with 30-40 nucleotides is synthesized using an Applied Biosystems DNA synthesizer according to the sequence reported. The oligonucleotide is labeled, for instance, with ³²P-γ-ATP using T4 polynucleotide kinase and purified according to routine methods. (E.g., Maniatis et al., Molecular Cloning: A Laboratory Manual, Cold Spring Harbor Press, Cold Spring, N.Y. (1982)). The plasmid mixture is transformed into a suitable host, as indicated above (such as XL-1 Blue (Stratagene)) using techniques known to those of skill in the art, such as those provided by the vector supplier or in related publications or patents cited above. The transformants are plated on 1.5% agar plates (containing the appropriate selection agent, e.g., ampicillin) to a density of about 150 transformants (colonies) per plate. These plates are screened using Nylon membranes according to routine methods for bacterial colony screening (e.g., Sambrook et al., Molecular Cloning: A Laboratory Manual, 2nd Edit., (1989), Cold Spring Harbor Laboratory Press, pages 1.93 to 1.104), or other techniques known to those of skill in the art.

[0918] Alternatively, two primers of 17-20 nucleotides derived from both ends of the nucleotide sequence of SEQ ID NO:X are synthesized and used to amplify the desired cDNA using the deposited cDNA plasmid as a template. The polymerase chain reaction is carried out under routine conditions, for instance, in 25 μl of reaction mixture with 0.5 ug of the above cDNA template. A convenient reaction mixture is 1.5-5 mM MgCl₂, 0.01% (w/v) gelatin, 20 μM each of dATP, dCTP, dGTP, dTTP, 25 pmol of each primer and 0.25 Unit of Taq polymerase. Thirty five cycles of PCR (denaturation at 94° C. for 1 min; annealing at 55° C. for 1 min; elongation at 72° C. for 1 min) are performed with a Perkin-Elmer Cetus automated thermal cycler. The amplified product is analyzed by agarose gel electrophoresis and the DNA band with expected molecular weight is excised and purified. The PCR product is verified to be the selected sequence by subcloning and sequencing the DNA product.

[0919] Several methods are available for the identification of the 5′ or 3′ non-coding portions of a gene which may not be present in the deposited clone. These methods include but are not limited to, filter probing, clone enrichment using specific probes, and protocols similar or identical to 5′ and 3′ “RACE” protocols which are well known in the art. For instance, a method similar to 5′ RACE is available for generating the missing 5′ end of a desired full-length transcript. (Fromont-Racine et al., Nucleic Acids Res. 21(7):1683-1684 (1993)).

[0920] Briefly, a specific RNA oligonucleotide is ligated to the 5′ ends of a population of RNA presumably containing full-length gene RNA transcripts. A primer set containing a primer specific to the ligated RNA oligonucleotide and a primer specific to a known sequence of the gene of interest is used to PCR amplify the 5′ portion of the desired full-length gene. This amplified product may then be sequenced and used to generate the full length gene.

[0921] This above method starts with total RNA isolated from the desired source, although poly-A+ RNA can be used. The RNA preparation can then be treated with phosphatase if necessary to eliminate 5′ phosphate groups on degraded or damaged RNA which may interfere with the later RNA ligase step. The phosphatase should then be inactivated and the RNA treated with tobacco acid pyrophosphatase in order to remove the cap structure present at the 5′ ends of messenger RNAs. This reaction leaves a 5′ phosphate group at the 5′ end of the cap cleaved RNA which can then be ligated to an RNA oligonucleotide using T4 RNA ligase.

[0922] This modified RNA preparation is used as a template for first strand cDNA synthesis using a gene specific oligonucleotide. The first strand synthesis reaction is used as a template for PCR amplification of the desired 5′ end using a primer specific to the ligated RNA oligonucleotide and a primer specific to the known sequence of the gene of interest. The resultant product is then sequenced and analyzed to confirm that the 5′ end sequence belongs to the desired gene.

### Example 2

### Isolation of Genomic Clones Corresponding to a Polynucleotide

[0923] A human genomic PI library (Genomic Systems, Inc.) is screened by PCR using primers selected for the sequence corresponding to SEQ ID NO:X according to the method described in Example 1. (See also, Sambrook.)

### Example 3

### Tissue Specific Expression Analysis

[0924] The Human Genome Sciences, Inc. (HGS) database is derived from sequencing tissue and/or disease specific cDNA libraries. Libraries generated from a particular tissue are selected and the specific tissue expression pattern of EST groups or assembled contigs within these libraries is determined by comparison of the expression patterns of those groups or contigs within the entire database. ESTs and assembled contigs which show tissue specific expression are selected.

[0925] The original clone from which the specific EST sequence was generated, or in the case of an assembled contig, the clone from which the 5′ most EST sequence was generated, is obtained from the catalogued library of clones and the insert amplified by PCR using methods known in the art. The PCR product is denatured and then transferred in 96 or 384 well format to a nylon membrane (Schleicher and Scheull) generating an array filter of tissue specific clones. Housekeeping genes, maize genes, and known tissue specific genes are included on the filters. These targets can be used in signal normalization and to validate assay sensitivity. Additional targets are included to monitor probe length and specificity of hybridization.

[0926] Radioactively labeled hybridization probes are generated by first strand cDNA synthesis per the manufacturer's instructions (Life Technologies) from mRNA/RNA samples prepared from the specific tissue being analyzed (e.g., prostate, prostate cancer, ovarian, ovarian cancer, etc.). The hybridization probes are purified by gel exclusion chromatography, quantitated, and hybridized with the array filters in hybridization bottles at 65° C. overnight. The filters are washed under stringent conditions and signals are captured using a Fuji phosphorimager.

[0927] Data is extracted using AIS software and following background subtraction, signal normalization is performed. This includes a normalization of filter-wide expression levels between different experimental runs. Genes that are differentially expressed in the tissue of interest are identified.

### Example 4

### Chromosomal Mapping of the Polynucleotides

[0928] An oligonucleotide primer set is designed according to the sequence at the 5′ end of SEQ ID NO:X. This primer preferably spans about 100 nucleotides. This primer set is then used in a polymerase chain reaction under the following set of conditions: 30 seconds, 95° C.; 1 minute, 56° C.; 1 minute, 70° C. This cycle is repeated 32 times followed by one 5 minute cycle at 70° C. Human, mouse, and hamster DNA is used as template in addition to a somatic cell hybrid panel containing individual chromosomes or chromosome fragments (Bios, Inc). The reactions are analyzed on either 8% polyacrylamide gels or 3.5% agarose gels. Chromosome mapping is determined by the presence of an approximately 100 bp PCR fragment in the particular somatic cell hybrid.

### Example 5

### Bacterial Expression of a Potypeptide

[0929] A polynucleotide encoding a polypeptide of the present invention is amplified using PCR oligonucleotide primers corresponding to the 5′ and 3′ ends of the DNA sequence, as outlined in Example 1, to synthesize insertion fragments. The primers used to amplify the cDNA insert should preferably contain restriction sites, such as BamHI and XbaI, at the 5′ end of the primers in order to clone the amplified product into the expression vector. For example, BamHI and XbaI correspond to the restriction enzyme sites on the bacterial expression vector pQE-9. (Qiagen, Inc., Chatsworth, Calif.). This plasmid vector encodes antibiotic resistance (Amp^{r}), a bacterial origin of replication (ori), an IPTG-regulatable promoter/operator (P/O), a ribosome binding site (RBS), a 6-histidine tag (6-His), and restriction enzyme cloning sites.

[0930] The pQE-9 vector is digested with BamHI and XbaI and the amplified fragment is ligated into the pQE-9 vector maintaining the reading frame initiated at the bacterial RBS. The ligation mixture is then used to transform the E. coli strain M15/rep4 (Qiagen, Inc.) which contains multiple copies of the plasmid pREP4, which expresses the lacI repressor and also confers kanamycin resistance (Kan^{r}). Transformants are identified by their ability to grow on LB plates and ampicillin/kanamycin resistant colonies are selected. Plasmid DNA is isolated and confirmed by restriction analysis.

[0931] Clones containing the desired constructs are grown overnight (O/N) in liquid culture in LB media supplemented with both Amp (100 ug/ml) and Kan (25 ug/ml). The O/N culture is used to inoculate a large culture at a ratio of 1:100 to 1:250. The cells are grown to an optical density 600 (O.D.⁶⁰⁰) of between 0.4 and 0.6. IPTG (Isopropyl-B-D-thiogalacto pyranoside) is then added to a final concentration of 1 mM. IPTG induces by inactivating the lacI repressor, clearing the P/O leading to increased gene expression.

[0932] Cells are grown for an extra 3 to 4 hours. Cells are then harvested by centrifugation (20 mins at 6000× g). The cell pellet is solubilized in the chaotropic agent 6 Molar Guanidine HCl by stirring for 3-4 hours at 4° C. The cell debris is removed by centrifugation, and the supernatant containing the polypeptide is loaded onto a nickel-nitrilo-tri-acetic acid (“Ni-NTA”) affinity resin column (available from QIAGEN, Inc., supra). Proteins with a 6× His tag bind to the Ni-NTA resin with high affinity and can be purified in a simple one-step procedure (for details see: The QlAexpressionist (1995) QIAGEN, Inc., supra).

[0933] Briefly, the supernatant is loaded onto the column in 6 M guanidine-HCl, pH 8. The column is first washed with 10 volumes of 6 M guanidine-HCl, pH 8, then washed with 10 volumes of 6 M guanidine-HCl pH 6, and finally the polypeptide is eluted with 6 M guanidine-HCl, pH 5.

[0934] The purified protein is then renatured by dialyzing it against phosphate-buffered saline (PBS) or 50 mM Na-acetate, pH 6 buffer plus 200 mM NaCl. Alternatively, the protein can be successfully refolded while immobilized on the Ni-NTA column. The recommended conditions are as follows: renature using a linear 6M-1M urea gradient in 500 mM NaCl, 20% glycerol, 20 mM Tris/HCl pH 7.4, containing protease inhibitors. The renaturation should be performed over a period of 1.5 hours or more. After renaturation the proteins are eluted by the addition of 250 mM immidazole. Immidazole is removed by a final dialyzing step against PBS or 50 mM sodium acetate pH 6 buffer plus 200 mM NaCl. The purified protein is stored at 4° C. or frozen at −80° C.

[0935] In addition to the above expression vector, the present invention further includes an expression vector, called pHE4a (ATCC Accession Number 209645, deposited on Feb. 25, 1998) which contains phage operator and promoter elements operatively linked to a polynucleotide of the present invention, called pHE4a. (ATCC Accession Number 209645, deposited on Feb. 25, 1998.) This vector contains: 1) a neomycinphosphotransferase gene as a selection marker, 2) an E. coli origin of replication, 3) a T5 phage promoter sequence, 4) two lac operator sequences, 5) a Shine-Delgamo sequence, and 6) the lactose operon repressor gene (laclq). The origin of replication (oriC) is derived from pUC19 (LTI, Gaithersburg, Md.). The promoter and operator sequences are made synthetically.

[0936] DNA can be inserted into the pHE4a by restricting the vector with NdeI and XbaI, BamHI, Xhol, or Asp718, running the restricted product on a gel, and isolating the larger fragment (the stuffer fragment should be about 310 base pairs). The DNA insert is generated according to the PCR protocol described in Example 1, using PCR primers having restriction sites for NdeI (5′ primer) and XbaI, BamHI, XhoI, or Asp7l8 (3′ primer). The PCR insert is gel purified and restricted with compatible enzymes. The insert and vector are ligated according to standard protocols.

[0937] The engineered vector could easily be substituted in the above protocol to express protein in a bacterial system.

### Example 6

### Purification of a Polypeptide from an Inclusion Body

[0938] The following alternative method can be used to purify a polypeptide expressed in E coli when it is present in the form of inclusion bodies. Unless otherwise specified, all of the following steps are conducted at 4-10° C.

[0939] Upon completion of the production phase of the E. coli fermentation, the cell culture is cooled to 4-10° C. and the cells harvested by continuous centrifugation at 15,000 rpm (Heraeus Sepatech). On the basis of the expected yield of protein per unit weight of cell paste and the amount of purified protein required, an appropriate amount of cell paste, by weight, is suspended in a buffer solution containing 100 mM Tris, 50 mM EDTA, pH 7.4. The cells are dispersed to a homogeneous suspension using a high shear mixer.

[0940] The cells are then lysed by passing the solution through a microfluidizer (Microfuidics, Corp. or APV Gaulin, Inc.) twice at 4000-6000 psi. The homogenate is then mixed with NaCi solution to a final concentration of 0.5 M NaCl, followed by centrifugation at 7000× g for 15 min. The resultant pellet is washed again using 0.5M NaCl, 100 mM Tris, 50 mM EDTA, pH 7.4.

[0941] The resulting washed inclusion bodies are solubilized with 1.5 M guanidine hydrochloride (GuHCl) for 2-4 hours. After 7000 xg centrifugation for 15 min., the pellet is discarded and the polypeptide containing supernatant is incubated at 4° C. overnight to allow further GuHCl extraction.

[0942] Following high speed centrifugation (30,000× g) to remove insoluble particles, the GuHCl solubilized protein is refolded by quickly mixing the GuHCl extract with 20 volumes of buffer containing 50 mM sodium, pH 4.5, 150 mM NaCl, 2 mM EDTA by vigorous stirring. The refolded diluted protein solution is kept at 4° C. without mixing for 12 hours prior to further purification steps.

[0943] To clarify the refolded polypeptide solution, a previously prepared tangential filtration unit equipped with 0.16 μm membrane filter with appropriate surface area (e.g., Filtron), equilibrated with 40 mM sodium acetate, pH 6.0 is employed. The filtered sample is loaded onto a cation exchange resin (e.g., Poros HS-50, Perseptive Biosystems). The column is washed with 40 mM sodium acetate, pH 6.0 and eluted with 250 mM, 500 mM, 1000 mM, and 1500 mM NaCl in the same buffer, in a stepwise manner. The absorbance at 280 nm of the effluent is continuously monitored. Fractions are collected and further analyzed by SDS-PAGE.

[0944] Fractions containing the polypeptide are then pooled and mixed with 4 volumes of water. The diluted sample is then loaded onto a previously prepared set of tandem columns of strong anion (Poros HQ-50, Perseptive Biosystems) and weak anion (Poros CM-20, Perseptive Biosystems) exchange resins. The columns are equilibrated with 40 mM sodium acetate, pH 6.0. Both columns are washed with 40 mM sodium acetate, pH 6.0, 200 mM NaCl. The CM-20 column is then eluted using a 10 column volume linear gradient ranging from 0.2 M NaCl, 50 mM sodium acetate, pH 6.0 to 1.0 M NaCl, 50 mM sodium acetate, pH 6.5. Fractions are collected under constant A₂₈₀ monitoring of the effluent. Fractions containing the polypeptide (determined, for instance, by 16% SDS-PAGE) are then pooled.

[0945] The resultant polypeptide should exhibit greater than 95% purity after the above refolding and purification steps. No major contaminant bands should be observed from Commassie blue stained 16% SDS-PAGE gel when 5 μg of purified protein is loaded. The purified protein can also be tested for endotoxin/LPS contamination, and typically the LPS content is less than 0.1 ng/ml according to LAL assays.

### Example 7

### Cloning and Expression of a Polypeptide in a Baculovirus Expression System

[0946] In this example, the plasmid shuttle vector pA2 is used to insert a polynucleotide into a baculovirus to express a polypeptide. This expression vector contains the strong polyhedrin promoter of the Autographa califormica nuclear polyhedrosis virus (AcMNPV) followed by convenient restriction sites such as BamHI, Xba I and Asp7l8. The polyadenylation site of the simian virus 40 (“SV40”) is used for efficient polyadenylation. For easy selection of recombinant virus, the plasmid contains the beta-galactosidase gene from E. coli under control of a weak Drosophila promoter in the same orientation, followed by the polyadenylation signal of the polyhedrin gene. The inserted genes are flanked on both sides by viral sequences for cell-mediated homologous recombination with wild-type viral DNA to generate a viable virus that express the cloned polynucleotide.

[0947] Many other baculovirus vectors can be used in place of the vector above, such as pAc373, pVL941, and pAcIMl, as one skilled in the art would readily appreciate, as long as the construct provides appropriately located signals for transcription, translation, secretion and the like, including a signal peptide and an in-frame AUG as required. Such vectors are described, for instance, in Luckow et al., Virology 170:31-39 (1989).

[0948] Specifically, the cDNA sequence contained in the deposited clone, including the AUG initiation codon, is amplified using the PCR protocol described in Example 1. If a naturally occurring signal sequence is used to produce the polypeptide of the present invention, the pA2 vector does not need a second signal peptide. Alternatively, the vector can be modified (pA2 GP) to include a baculovirus leader sequence, using the standard methods described in Summers et al., “A Manual of Methods for Baculovirus Vectors and Insect Cell Culture Procedures,” Texas Agricultural Experimental Station Bulletin No. 1555 (1987).

[0949] The amplified fragment is isolated from a 1% agarose gel using a commercially available kit (“Geneclean,” BIO 101 Inc., La Jolla, Calif.). The fragment then is digested with appropriate restriction enzymes and again purified on a 1% agarose gel.

[0950] The plasmid is digested with the corresponding restriction enzymes and optionally, can be dephosphorylated using calf intestinal phosphatase, using routine procedures known in the art. The DNA is then isolated from a 1% agarose gel using a commercially available kit (“Geneclean” BIO 101 Inc., La Jolla, Calif.).

[0951] The fragment and the dephosphorylated plasmid are ligated together with T4 DNA ligase. E. coli HB101 or other suitable E. coli hosts such as XL-1 Blue (Stratagene Cloning Systems, La Jolla, Calif.) cells are transformed with the ligation mixture and spread on culture plates. Bacteria containing the plasmid are identified by digesting DNA from individual colonies and analyzing the digestion product by gel electrophoresis. The sequence of the cloned fragment is confirmed by DNA sequencing.

[0952] Five μg of a plasmid containing the polynucleotide is co-transfected with 1.0 μg of a commercially available linearized baculovirus DNA (“BaculoGold™ baculovirus DNA, Pharmingen, San Diego, Calif.), using the lipofection method described by Felgner et al., Proc. Natl. Acad. Sci. USA 84:7413-7417 (1987). One μg of BaculoGold™ virus DNA and 5 μg of the plasmid are mixed in a sterile well of a microtiter plate containing 50 μl of serum-free Grace's medium (Life Technologies Inc., Gaithersburg, Md.). Afterwards, 10 μl Lipofectin plus 90 μl Grace's medium are added, mixed and incubated for 15 minutes at room temperature. Then the transfection mixture is added drop-wise to Sf9 insect cells (ATCC CRL 1711) seeded in a 35 mm tissue culture plate with 1 ml Grace's medium without serum. The plate is then incubated for 5 hours at 27° C. The transfection solution is then removed from the plate and 1 ml of Grace's insect medium supplemented with 10% fetal calf serum is added. Cultivation is then continued at 27° C. for four days.

[0953] After four days the supernatant is collected and a plaque assay is performed, as described by Summers and Smith, supra. An agarose gel with “Blue Gal” (Life Technologies Inc., Gaithersburg) is used to allow easy identification and isolation of gal-expressing clones, which produce blue-stained plaques. (A detailed description of a “plaque assay” of this type can also be found in the user's guide for insect cell culture and baculovirology distributed by Life Technologies Inc., Gaithersburg, page 9-10.) After appropriate incubation, blue stained plaques are picked with the tip of a micropipettor (e.g., Eppendorf). The agar containing the recombinant viruses is then resuspended in a microcentrifuge tube containing 200 μl of Grace's medium and the suspension containing the recombinant baculovirus is used to infect Sf9 cells seeded in 35 mm dishes. Four days later the supernatants of these culture dishes are harvested and then they are stored at 4° C.

[0954] To verify the expression of the polypeptide, Sf9 cells are grown in Grace's medium supplemented with 10% heat-inactivated FBS. The cells are infected with the recombinant baculovirus containing the polynucleotide at a multiplicity of infection (“MOI”) of about 2. If radiolabeled proteins are desired, 6 hours later the medium is removed and is replaced with SF900 II medium minus methionine and cysteine (available from Life Technologies Inc., Rockville, Md.). After 42 hours, 5 μCi of ³⁵S-methionine and 5 μCi ³⁵S-cysteine (available from Amersham) are added. The cells are further incubated for 16 hours and then are harvested by centrifugation. The proteins in the supernatant as well as the intracellular proteins are analyzed by SDS-PAGE followed by autoradiography (if radiolabeled).

[0955] Microsequencing of the amino acid sequence of the amino terminus of purified protein may be used to determine the amino terminal sequence of the produced protein.

### Example 8

### Expression of a Polypeptide in Mammalian Cells

[0956] The polypeptide of the present invention can be expressed in a mammalian cell. A typical mammalian expression vector contains a promoter element, which mediates the initiation of transcription of mRNA, a protein coding sequence, and signals required for the termination of transcription and polyadenylation of the transcript. Additional elements include enhancers, Kozak sequences and intervening sequences flanked by donor and acceptor sites for RNA splicing. Highly efficient transcription is achieved with the early and late promoters from SV40, the long terminal repeats (LTRs) from Retroviruses, e.g., RSV, HTLVI, HIVI and the early promoter of the cytomegalovirus (CMV). However, cellular elements can also be used (e.g., the human actin promoter).

[0957] Suitable expression vectors for use in practicing the present invention include, for example, vectors such as pSVL and pMSG (Pharmacia, Uppsala, Sweden), pRSVcat (ATCC 37152), pSV2dhfr (ATCC 37146), pBC12MI (ATCC 67109), pCMVSport 2.0, and pCMVSport 3.0. Mammalian host cells that could be used include, human Hela, 293, H9 and Jurkat cells, mouse NIH3T3 and C127 cells, Cos 1, Cos 7 and CVI, quail QC1-3 cells, mouse L cells and Chinese hamster ovary (CHO) cells.

[0958] Alternatively, the polypeptide can be expressed in stable cell lines containing the polynucleotide integrated into a chromosome. The co-transfection with a selectable marker such as DHFR, gpt, neomycin, or hygromycin allows the identification and isolation of the transfected cells.

[0959] The transfected gene can also be amplified to express large amounts of the encoded protein. The DHFR (dihydrofolate reductase) marker is useful in developing cell lines that carry several hundred or even several thousand copies of the gene of interest. (See, e.g., Alt, F. W., et al., J. Biol. Chem. 253:1357-1370 (1978); Hamlin, J. L. and Ma, C., Biochem. et Biophys. Acta, 1097:107-143 (1990); Page, M. J. and Sydenham, M. A., Biotechnology 9:64-68 (1991)). Another useful selection marker is the enzyme glutamine synthase (GS) (Murphy et al., Biochem J. 227:277-279 (1991); Bebbington et al., Bio/Technology 10: 169-175 (1992). Using these markers, the mammalian cells are grown in selective medium and the cells with the highest resistance are selected. These cell lines contain the amplified gene(s) integrated into a chromosome. Chinese hamster ovary (CHO) and NSO cells are often used for the production of proteins.

[0960] Derivatives of the plasmid pSV2-dhfr (ATCC Accession No. 37146), the expression vectors pC4 (ATCC Accession No. 209646) and pC6 (ATCC Accession No.209647) contain the strong promoter (LTR) of the Rous Sarcoma Virus (Cullen et al., Molecular and Cellular Biology, 438-447 (March, 1985)) plus a fragment of the CMV-enhancer (Boshart et al., Cell 41:521-530 (1985)). Multiple cloning sites, e.g., with the restriction enzyme cleavage sites BamHI, XbaI and Asp718, facilitate the cloning of the gene of interest. The vectors also contain the 3′ intron, the polyadenylation and termination signal of the rat preproinsulin gene, and the mouse DHFR gene under control of the SV40 early promoter.

[0961] Specifically, the plasmid pC6, for example, is digested with appropriate restriction enzymes and then dephosphorylated using calf intestinal phosphates by procedures known in the art. The vector is then isolated from a 1% agarose gel.

[0962] A polynucleotide of the present invention is amplified according to the protocol outlined in Example 1. If a naturally occurring signal sequence is used to produce the polypeptide of the present invention, the vector does not need a second signal peptide. Alternatively, if a naturally occurring signal sequence is not used, the vector can be modified to include a heterologous signal sequence. (See, e.g., International Publication No. WO 96/34891.)

[0963] The amplified fragment is isolated from a 1% agarose gel using a commercially available kit (“Geneclean,” BIO 101 Inc., La Jolla, Calif.). The fragment then is digested with appropriate restriction enzymes and again purified on a 1% agarose gel.

[0964] The amplified fragment is then digested with the same restriction enzyme and purified on a 1% agarose gel. The isolated fragment and the dephosphorylated vector are then ligated with T4 DNA ligase. E. coli HB101 or XL-1 Blue cells are then transformed and bacteria are identified that contain the fragment inserted into plasmid pC6 using, for instance, restriction enzyme analysis.

[0965] Chinese hamster ovary cells lacking an active DHFR gene is used for transfection. Five μg of the expression plasmid pC6 or pC4 is cotransfected with 0.5 μg of the plasmid pSVneo using lipofectin (Felgner et al., supra). The plasmid pSV2-neo contains a dominant selectable marker, the neo gene from Tn5 encoding an enzyme that confers resistance to a group of antibiotics including G418. The cells are seeded in alpha minus MEM supplemented with 1 mg/ml G418. After 2 days, the cells are trypsinized and seeded in hybridoma cloning plates (Greiner, Germany) in alpha minus MEM supplemented with 10, 25, or 50 ng/ml of methotrexate plus 1 mg/ml G418. After about 10⁻¹⁴ days single clones are trypsinized and then seeded in 6-well petri dishes or 10 ml flasks using different concentrations of methotrexate (50 nM, 100 nM, 200 nM, 400 nM, 800 nM). Clones growing at the highest concentrations of methotrexate are then transferred to new 6-well plates containing even higher concentrations of methotrexate (1 μM, 2 μM, 5 μM, 10 mM, 20 mM). The same procedure is repeated until clones are obtained which grow at a concentration of 100-200 μM. Expression of the desired gene product is analyzed, for instance, by SDS-PAGE and Western blot or by reversed phase HPLC analysis.

### Example 9

### Protein Fusions

[0966] The polypeptides of the present invention are preferably fused to other proteins. These fusion proteins can be used for a variety of applications. For example, fusion of the present polypeptides to His-tag, HA-tag, protein A, IgG domains, and maltose binding protein facilitates purification. (See Example 5; see also EP A 394,827; Traunecker, et al., Nature 331:84-86 (1988)). Similarly, fusion to IgG-1, IgG-3, and albumin increases the halflife time in vivo. Nuclear localization signals fused to the polypeptides of the present invention can target the protein to a specific subcellular localization, while covalent heterodimer or homodimers can increase or decrease the activity of a fusion protein. Fusion proteins can also create chimeric molecules having more than one function. Finally, fusion proteins can increase solubility and/or stability of the fused protein compared to the non-fused protein. All of the types of fusion proteins described above can be made by modifying the following protocol, which outlines the fusion of a polypeptide to an IgG molecule, or the protocol described in Example 5.

[0967] Briefly, the human Fc portion of the IgG molecule can be PCR amplified, using primers that span the 5′ and 3′ ends of the sequence described below. These primers also should have convenient restriction enzyme sites that will facilitate cloning into an expression vector, preferably a mammalian expression vector.

[0968] For example, if pC4 (ATCC Accession No. 209646) is used, the human Fc portion can be ligated into the BamHI cloning site. Note that the 3′ BamHI site should be destroyed. Next, the vector containing the human Fc portion is re-restricted with BamHI, linearizing the vector, and a polynucleotide of the present invention, isolated by the PCR protocol described in Example 1, is ligated into this BamHI site. Note that the polynucleotide is cloned without a stop codon, otherwise a fusion protein will not be produced.

[0969] If the naturally occurring signal sequence is used to produce the polypeptide of the present invention, pC4 does not need a second signal peptide. Alternatively, if the naturally occurring signal sequence is not used, the vector can be modified to include a heterologous signal sequence. (See, e.g., International Publication No. WO 96/34891.)

[0970] Human IgG Fc Region:

| | |
|---|---|
| GGGATCCGGAGCCCAAATCTTCTGACAAAACTCACACATGCCCACCGT | (SEQ ID NO: 1) |
| GCCCAGCACCTGAATTCGAGGGTGCACCGTCAGTCTTCCTCTTCCCCCC | |
| AAAACCCAAGGACACCCTCATGATCTCCCGGACTCCTGAGGTCACATG | |
| CGTGGTGGTGGACGTAAGCCACGAAGACCCTGAGGTCAAGTTCAACTG | |
| GTACGTGGACGGCGTGGAGGTGCATAATGCCAAGACAAAGCCGCGGG | |
| AGGAGCAGTACAACAGCACGTACCGTGTGGTCAGCGTCCTCACCGTCC | |
| TGCACCAGGACTGGCTGAATGGCAAGGAGTACAAGTGCAAGGTCTCCA | |
| ACAAAGCCCTCCCAACCCCCATCGAGAAAACCATCTCCAAAGCCAAAG | |
| GGCAGCCCCGAGAACCACAGGTGTACACCCTGCCCCCATCCCGGGATG | |
| AGCTGACCAAGAACCAGGTCAGCCTGACCTGCCTGGTCAAAGGCTTCT | |
| ATCCAAGCGACATCGCCGTGGAGTGGGAGAGCAATGGGCAGCCGGAG | |
| AACAACTACAAGACCACGCCTCCCGTGCTGGACTCCGACGGCTCCTTCT | |
| TCCTCTACAGCAAGCTCACCGTGGACAAGAGCAGGTGGCAGCAGGGGA | |
| ACGTCTTCTCATGCTCCGTGATGCATGAGGCTCTGCACAACCACTACAC | |
| GCAGAAGAGCCTCTCCCTGTCTCCGGGTAAATGAGTGCGACGGCCGCG | |
| ACTCTAGAGGAT | |

### Example 10

### Production of an Antibody from a Polypeptide Hybridoma Technology

[0971] The antibodies of the present invention can be prepared by a variety of methods. (See, Current Protocols, Chapter 2.) As one example of such methods, cells expressing a polypeptide of the invention are administered to an animal to induce the production of sera containing polyclonal antibodies. In a preferred method, a preparation of a polypeptide of the invention is prepared and purified to render it substantially free of natural contaminants. Such a preparation is then introduced into an animal in order to produce polyclonal antisera of greater specific activity.

[0972] Monoclonal antibodies specific for a polypeptide of the invention are prepared using hybridoma technology (Kohler et al., Nature 256:495 (1975); Kohler et al., Eur. J. Immunol. 6:511 (1976); Kohler et al., Eur. J. Immunol. 6:292 (1976); Hammerling et al., in: Monoclonal Antibodies and T-Cell Hybridomas, Elsevier, N.Y., pp. 563-681 (1981)). In general, an animal (preferably a mouse) is immunized with a polypeptide of the invention or, more preferably, with a cell expressing a secreted polypeptide of the invention. Such polypeptide-expressing cells are cultured in any suitable tissue culture medium, preferably in Earle's modified Eagle's medium supplemented with 10% fetal bovine serum (inactivated at about 56° C.), and supplemented with about 10 g/l of nonessential amino acids, about 1,000 U/ml of penicillin, and about 100 μg/ml of streptomycin.

[0973] The splenocytes of such mice are extracted and fused with a suitable myeloma cell line. Any suitable myeloma cell line may be employed in accordance with the present invention; however, it is preferable to employ the parent myeloma cell line (SP20), available from the ATCC. After fision, the resulting hybridoma cells are selectively maintained in HAT medium, and then cloned by limiting dilution as described by Wands et al. (Gastroenterology 80:225-232 (1981)). The hybridoma cells obtained through such a selection are then assayed to identify clones which secrete antibodies capable of binding the polypeptide of the invention.

[0974] Alternatively, additional antibodies capable of binding to a polypeptide of the invention can be produced in a two-step procedure using anti-idiotypic antibodies. Such a method makes use of the fact that antibodies are themselves antigens, and therefore, it is possible to obtain an antibody which binds to a second antibody. In accordance with this method, protein specific antibodies are used to immunize an animal, preferably a mouse. The splenocytes of such an animal are then used to produce hybridoma cells, and the hybridoma cells are screened to identify clones which produce an antibody whose ability to bind to the antibodies specific to a polypeptide of the invention can be blocked by the polypeptide of the invention. Such antibodies comprise anti-idiotypic antibodies to the polypeptide of the invention-specific antibody and are used to immunize an animal to induce formation of further polypeptide of the invention-specific antibodies.

[0975] For in vivo use of antibodies in humans, an antibody is “humanized”. Such antibodies can be produced using genetic constructs derived from hybridoma cells producing the monoclonal antibodies described above. Methods for producing chimeric and humanized antibodies are known in the art and are discussed herein. (See, for review, Morrison, Science 229:1202 (1985); Oi et al., BioTechniques 4:214 (1986); Cabilly et al., U.S. Pat. No. 4,816,567; Taniguchi et al., EP 171496; Morrison et al., EP 173494; Neuberger et al., WO 8601533; Robinson et al., International Publication No. WO 8702671; Boulianne et al., Nature 312:643 (1984); Neuberger et al., Nature 314:268 (1985)).

[0976] Isolation of Antibody Fragments Directed Against a Polypeptide of the Invention from a Library of scFvs

[0977] Naturally occurring V-genes isolated from human PBLs are constructed into a library of antibody fragments which contain reactivities against a polypeptide of the invention to which the donor may or may not have been exposed (see e.g., U.S. Pat. No. 5,885,793 incorporated herein by reference in its entirety).

[0978] Rescue of the Library.

[0979] A library of scFvs is constructed from the RNA of human PBLs as described in International Publication No. WO 92/01047. To rescue phage displaying antibody fragments, approximately 10⁹ E. coli harboring the phagemid are used to inoculate 50 ml of 2xTY containing 1% glucose and 100 μg/ml of ampicillin (2xTY-AMP-GLU) and grown to an O.D. of 0.8 with shaking. Five ml of this culture is used to inoculate 50 ml of 2xTY-AMP-GLU, 2×108 TU of delta gene 3 helper (M13 delta gene III, see International Publication No. WO 92/01047) are added and the culture incubated at 37° C. for 45 minutes without shaking and then at 37° C. for 45 minutes with shaking. The culture is centrifuged at 4000 r.p.m. for 10 min. and the pellet resuspended in 2 liters of 2xTY containing 100 μg/ml ampicillin and 50 ug/ml kanamycin and grown overnight. Phage are prepared as described in International Publication No. WO 92/01047.

[0980] M13 delta gene III is prepared as follows: M13 delta gene III helper phage does not encode gene III protein, hence the phage(mid) displaying antibody fragments have a greater avidity of binding to antigen. Infectious M13 delta gene III particles are made by growing the helper phage in cells harboring a pUC19 derivative supplying the wild type gene III protein during phage morphogenesis. The culture is incubated for 1 hour at 37° C. without shaking and then for a further hour at 37° C. with shaking. Cells are spun down (IEC-Centra 8,400 r.p.m. for 10 min), resuspended in 300 ml 2xTY broth containing 100 μg ampicillin/ml and 25 μg kanamycin/ml (2xTY-AMP-KAN) and grown overnight, shaking at 37° C. Phage particles are purified and concentrated from the culture medium by two PEG-precipitations (Sambrook et al., 1990), resuspended in 2 ml PBS and passed through a 0.45 μm filter (Minisart NML; Sartorius) to give a final concentration of approximately 10¹³ transducing units/ml (ampicillin-resistant clones).

[0981] Panning of the Library.

[0982] Immunotubes (Nunc) are coated overnight in PBS with 4 ml of either 100 μg/ml or 10 μg/ml of a polypeptide of the present invention. Tubes are blocked with 2% Marvel-PBS for 2 hours at 37° C. and then washed 3 times in PBS. Approximately 10¹³ TU of phage is applied to the tube and incubated for 30 minutes at room temperature tumbling on an over and under turntable and then left to stand for another 1.5 hours. Tubes are washed 10 times with PBS 0.1% Tween-20 and 10 times with PBS. Phage are eluted by adding 1 ml of 100 mM triethylamine and rotating 15 minutes on an under and over turntable after which the solution is immediately neutralized with 0.5 ml of 1.0M Tris-HCl, pH 7.4. Phage are then used to infect 10 ml of mid-log E. coli TG1 by incubating eluted phage with bacteria for 30 minutes at 37° C. The E. coli are then plated on TYE plates containing 1% glucose and 100 μg/ml ampicillin. The resulting bacterial library is then rescued with delta gene 3 helper phage as described above to prepare phage for a subsequent round of selection. This process is then repeated for a total of 4 rounds of affinity purification with tube-washing increased to 20 times with PBS, 0.1% Tween-20 and 20 times with PBS for rounds 3 and 4.

[0983] Characterization of Binders.

[0984] Eluted phage from the 3rd and 4th rounds of selection are used to infect E. coli HB 2151 and soluble scFv is produced (Marks, et al., 1991) from single colonies for assay. ELISAs are performed with microtitre plates coated with either 10 pg/ml of the polypeptide of the present invention in 50 mM bicarbonate pH 9.6. Clones positive in ELISA are further characterized by PCR fingerprinting (see, e.g., International Publication No. WO 92/01047) and then by sequencing. These ELISA positive clones may also be further characterized by techniques known in the art, such as, for example, epitope mapping, binding affinity, receptor signal transduction, ability to block or competitively inhibit antibody/antigen binding, and competitive agonistic or antagonistic activity.

### Example 11

### Method of Determining Alterations in a Gene Corresponding to a Polynucleotide

[0985] RNA isolated from entire families or individual patients presenting with a phenotype of interest (such as a disease) is isolated. cDNA is then generated from these RNA samples using protocols known in the art. (See, Sambrook.) The cDNA is then used as a template for PCR, employing primers surrounding regions of interest in SEQ ID NO:X; and/or the nucleotide sequence of the cDNA contained in Clone ID NO:Z. Suggested PCR conditions consist of 35 cycles at 95 degrees C. for 30 seconds; 60-120 seconds at 52-58 degrees C.; and 60-120 seconds at 70 degrees C., using buffer solutions described in Sidransky et al., Science 252:706 (1991).

[0986] PCR products are then sequenced using primers labeled at their 5′ end with T4 polynucleotide kinase, employing SequiTherm Polymerase (Epicentre Technologies). The intron-exon boundaries of selected exons is also determined and genomic PCR products analyzed to confirm the results. PCR products harboring suspected mutations are then cloned and sequenced to validate the results of the direct sequencing.

[0987] PCR products are cloned into T-tailed vectors as described in Holton et al., Nucleic Acids Research, 19:1156 (1991) and sequenced with T7 polymerase (United States Biochemical). Affected individuals are identified by mutations not present in unaffected individuals.

[0988] Genomic rearrangements are also observed as a method of determining alterations in a gene corresponding to a polynucleotide. Genomic clones isolated according to Example 2 are nick-translated with digoxigenindeoxy-uridine 5′-triphosphate (Boehringer Manheim), and FISH performed as described in Johnson et al., Methods Cell Biol. 35:73-99 (1991). Hybridization with the labeled probe is carried out using a vast excess of human cot-I DNA for specific hybridization to the corresponding genomic locus.

[0989] Chromosomes are counterstained with 4,6-diamino-2-phenylidole and propidium iodide, producing a combination of C- and R-bands. Aligned images for precise mapping are obtained using a triple-band filter set (Chroma Technology, Brattleboro, Vt.) in combination with a cooled charge-coupled device camera (Photometrics, Tucson, Ariz.) and variable excitation wavelength filters. (Johnson et al., Genet. Anal. Tech. Appl., 8:75 (1991)). Image collection, analysis and chromosomal fractional length measurements are performed using the ISee Graphical Program System. (Inovision Corporation, Durham, N.C.) Chromosome alterations of the genomic region hybridized by the probe are identified as insertions, deletions, and translocations. These alterations are used as a diagnostic marker for an associated disease.

### Example 12

### Method of Detecting Abnormal Levels of a Polypeptide in a Biological Sample

[0990] A polypeptide of the present invention can be detected in a biological sample, and if an increased or decreased level of the polypeptide is detected, this polypeptide is a marker for a particular phenotype. Methods of detection are numerous, and thus, it is understood that one skilled in the art can modify the following assay to fit their particular needs.

[0991] For example, antibody-sandwich ELISAs are used to detect polypeptides in a sample, preferably a biological sample. Wells of a microtiter plate are coated with specific antibodies, at a final concentration of 0.2 to 10 ug/ml. The antibodies are either monoclonal or polyclonal and are produced by the method described in Example 10. The wells are blocked so that non-specific binding of the polypeptide to the well is reduced.

[0992] The coated wells are then incubated for >2 hours at RT with a sample containing the polypeptide. Preferably, serial dilutions of the sample should be used to validate results. The plates are then washed three times with deionized or distilled water to remove unbound polypeptide.

[0993] Next, 50 ul of specific antibody-alkaline phosphatase conjugate, at a concentration of 25-400 ng, is added and incubated for 2 hours at room temperature. The plates are again washed three times with deionized or distilled water to remove unbound conjugate.

[0994] Add 75 ul of 4-methylumbelliferyl phosphate (MUP) or p-nitrophenyl phosphate (NPP) substrate solution to each well and incubate 1 hour at room temperature. Measure the reaction by a microtiter plate reader. Prepare a standard curve, using serial dilutions of a control sample, and plot polypeptide concentration on the X-axis (log scale) and fluorescence or absorbance of the Y-axis (linear scale). Interpolate the concentration of the polypeptide in the sample using the standard curve.

### Example 13

### Formulation

[0995] The invention also provides methods of treatment and/or prevention of diseases or disorders (such as, for example, any one or more of the diseases or disorders disclosed herein) by administration to a subject of an effective amount of a Therapeutic. By therapeutic is meant polynucleotides or polypeptides of the invention (including fragments and variants), agonists or antagonists thereof, and/or antibodies thereto, in combination with a pharmaceutically acceptable carrier type (e.g., a sterile carrier).

[0996] The Therapeutic will be formulated and dosed in a fashion consistent with good medical practice, taking into account the clinical condition of the individual patient (especially the side effects of treatment with the Therapeutic alone), the site of delivery, the method of administration, the scheduling of administration, and other factors known to practitioners. The “effective amount” for purposes herein is thus determined by such considerations.

[0997] As a general proposition, the total pharmaceutically effective amount of the Therapeutic administered parenterally per dose will be in the range of about lug/kg/day to 10 mg/kg/day of patient body weight, although, as noted above, this will be subject to therapeutic discretion. More preferably, this dose is at least 0.01 mg/kg/day, and most preferably for humans between about 0.01 and 1 mg/kg/day for the hormone. If given continuously, the Therapeutic is typically administered at a dose rate of about 1 ug/kg/hour to about 50 ug/kg/hour, either by 1-4 injections per day or by continuous subcutaneous infusions, for example, using a mini-pump. An intravenous bag solution may also be employed. The length of treatment needed to observe changes and the interval following treatment for responses to occur appears to vary depending on the desired effect.

[0998] Therapeutics can be are administered orally, rectally, parenterally, intracistemally, intravaginally, intraperitoneally, topically (as by powders, ointments, gels, drops or transdermal patch), bucally, or as an oral or nasal spray. “Pharmaceutically acceptable carrier” refers to a non-toxic solid, semisolid or liquid filler, diluent, encapsulating material or formulation auxiliary of any. The term “parenteral” as used herein refers to modes of administration which include intravenous, intramuscular, intraperitoneal, intrasternal, subcutaneous and intraarticular injection and infusion.

[0999] Therapeutics of the invention are also suitably administered by sustained-release systems. Suitable examples of sustained-release Therapeutics are administered orally, rectally, parenterally, intracistemally, intravaginally, intraperitoneally, topically (as by powders, ointments, gels, drops or transdermal patch), bucally, or as an oral or nasal spray. “Pharmaceutically acceptable carrier” refers to a non-toxic solid, semisolid or liquid filler, diluent, encapsulating material or formulation auxiliary of any type. The term “parenteral” as used herein refers to modes of administration which include intravenous, intramuscular, intraperitoneal, intrastemal, subcutaneous and intraarticular injection and infusion.

[1000] Therapeutics of the invention are also suitably administered by sustained-release systems. Suitable examples of sustained-release Therapeutics include suitable polymeric materials (such as, for example, semi-permeable polymer matrices in the form of shaped articles, e.g., films, or mirocapsules), suitable hydrophobic materials (for example as an emulsion in an acceptable oil) or ion exchange resins, and sparingly soluble derivatives (such as, for example, a sparingly soluble salt).

[1001] Sustained-release matrices include polylactides (U.S. Pat. No. 3,773,919, EP 58,481), copolymers of L-glutamic acid and gamma-ethyl-L-glutamate (Sidman et al., Biopolymers 22:547-556 (1983)), poly (2-hydroxyethyl methacrylate) (Langer et al., J. Biomed. Mater. Res. 15:167-277 (1981), and Langer, Chem. Tech. 12:98-105 (1982)), ethylene vinyl acetate (Langer et al., Id.) or poly-D-(-)-3-hydroxybutyric acid (EP 133,988).

[1002] Sustained-release Therapeutics also include liposomally entrapped Therapeutics of the invention (see generally, Langer, Science 249:1527-1533 (1990); Treat et al., in Liposomes in the Therapy of Infectious Disease and Cancer, Lopez-Berestein and Fidler (eds.), Liss, New York, pp. 317-327 and 353-365 (1989)). Liposomes containing the Therapeutic are prepared by methods known per se: DE 3,218,121; Epstein et al., Proc. Natl. Acad. Sci. (USA) 82:3688-3692 (1985); Hwang et al., Proc. Natl. Acad. Sci.(USA) 77:4030-4034 (1980); EP 52,322; EP 36,676; EP 88,046; EP 143,949; EP 142,641; Japanese Pat. Appl. 83-118008; U.S. Pat. Nos. 4,485,045 and 4,544,545; and EP 102,324. Ordinarily, the liposomes are of the small (about 200-800 Angstroms) unilamellar type in which the lipid content is greater than about 30 mol. percent cholesterol, the selected proportion being adjusted for the optimal Therapeutic.

[1003] In yet an additional embodiment, the Therapeutics of the invention are delivered by way of a pump (see Langer, supra; Sefton, CRC Crit. Ref. Biomed. Eng. 14:201 (1987); Buchwald et al., Surgery 88:507 (1980); Saudek et al., N. Engl. J. Med. 321:574 (1989)).

[1004] Other controlled release systems are discussed in the review by Langer (Science 249:1527-1533 (1990)).

[1005] For parenteral administration, in one embodiment, the Therapeutic is formulated generally by mixing it at the desired degree of purity, in a unit dosage injectable form (solution, suspension, or emulsion), with a pharmaceutically acceptable carrier, i.e., one that is non-toxic to recipients at the dosages and concentrations employed and is compatible with other ingredients of the formulation. For example, the formulation preferably does not include oxidizing agents and other compounds that are known to be deleterious to the Therapeutic.

[1006] Generally, the formulations are prepared by contacting the Therapeutic uniformly and intimately with liquid carriers or finely divided solid carriers or both. Then, if necessary, the product is shaped into the desired formulation. Preferably the carrier is a parenteral carrier, more preferably a solution that is isotonic with the blood of the recipient. Examples of such carrier vehicles include water, saline, Ringer's solution, and dextrose solution. Non-aqueous vehicles such as fixed oils and ethyl oleate are also useful herein, as well as liposomes.

[1007] The carrier suitably contains minor amounts of additives such as substances that enhance isotonicity and chemical stability. Such materials are non-toxic to recipients at the dosages and concentrations employed, and include buffers such as phosphate, citrate, succinate, acetic acid, and other organic acids or their salts; antioxidants such as ascorbic acid; low molecular weight (less than about ten residues) polypeptides, e.g., polyarginine or tripeptides; proteins, such as serum albumin, gelatin, or immunoglobulins; hydrophilic polymers such as polyvinylpyrrolidone; amino acids, such as glycine, glutamic acid, aspartic acid, or arginine; monosaccharides, disaccharides, and other carbohydrates including cellulose or its derivatives, glucose, manose, or dextrins; chelating agents such as EDTA; sugar alcohols such as mannitol or sorbitol; counterions such as sodium; and/or nonionic surfactants such as polysorbates, poloxamers, or PEG.

[1008] The Therapeutic is typically formulated in such vehicles at a concentration of about 0.1 mg/ml to 100 mg/ml, preferably 1-10 mg/ml, at a pH of about 3 to 8. It will be understood that the use of certain of the foregoing excipients, carriers, or stabilizers will result in the formation of polypeptide salts.

[1009] Any pharmaceutical used for therapeutic administration can be sterile. Sterility is readily accomplished by filtration through sterile filtration membranes (e.g., 0.2 micron membranes). Therapeutics generally are placed into a container having a sterile access port, for example, an intravenous solution bag or vial having a stopper pierceable by a hypodermic injection needle.

[1010] Therapeutics ordinarily will be stored in unit or multi-dose containers, for example, sealed ampoules or vials, as an aqueous solution or as a lyophilized formulation for reconstitution. As an example of a lyophilized formulation, 10-ml vials are filled with 5 ml of sterile-filtered 1% (w/v) aqueous Therapeutic solution, and the resulting mixture is lyophilized. The infusion solution is prepared by reconstituting the lyophilized Therapeutic using bacteriostatic Water-for-Injection.

[1011] The invention also provides a pharmaceutical pack or kit comprising one or more containers filled with one or more of the ingredients of the Therapeutics of the invention. Associated with such container(s) can be a notice in the form prescribed by a governmental agency regulating the manufacture, use or sale of pharmaceuticals or biological products, which notice reflects approval by the agency of manufacture, use or sale for human administration. In addition, the Therapeutics may be employed in conjunction with other therapeutic compounds.

[1012] The Therapeutics of the invention may be administered alone or in combination with adjuvants. Adjuvants that may be administered with the Therapeutics of the invention include, but are not limited to, alum, alum plus deoxycholate (ImmunoAg), MTP-PE (Biocine Corp.), QS21 (Genentech, Inc.), BCG (e.g., THERACYS®), MPL and nonviable prepartions of Corynebacterium parvum. In a specific embodiment, Therapeutics of the invention are administered in combination with alum. In another specific embodiment, Therapeutics of the invention are administered in combination with QS-21. Further adjuvants that may be administered with the Therapeutics of the invention include, but are not limited to, Monophosphoryl lipid immunomodulator, AdjuVax 100a, QS-21, QS-18, CRL1005, Aluminum salts, MF-59, and Virosomal adjuvant technology. Vaccines that may be administered with the Therapeutics of the invention include, but are not limited to, vaccines directed toward protection against MMR (measles, mumps, rubella), polio, varicella, tetanus/diptheria, hepatitis A, hepatitis B, haemophilus influenzae B, whooping cough, pneumonia, influenza, Lyme's Disease, rotavirus, cholera, yellow fever, Japanese encephalitis, poliomyelitis, rabies, typhoid fever, and pertussis. Combinations may be administered either concomitantly, e.g., as an admixture, separately but simultaneously or concurrently; or sequentially. This includes presentations in which the combined agents are administered together as a therapeutic mixture, and also procedures in which the combined agents are administered separately but simultaneously, e.g., as through separate intravenous lines into the same individual. Administration “in combination” further includes the separate administration of one of the compounds or agents given first, followed by the second.

[1013] The Therapeutics of the invention may be administered alone or in combination with other therapeutic agents. Therapeutic agents that may be administered in combination with the Therapeutics of the invention, include but not limited to, chemotherapeutic agents, antibiotics, steroidal and non-steroidal anti-inflammatories, conventional immunotherapeutic agents, and/or therapeutic treatments described below. Combinations may be administered either concomitantly, e.g., as an admixture, separately but simultaneously or concurrently; or sequentially. This includes presentations in which the combined agents are administered together as a therapeutic mixture, and also procedures in which the combined agents are administered separately but simultaneously, e.g., as through separate intravenous lines into the same individual. Administration “in combination” further includes the separate administration of one of the compounds or agents given first, followed by the second.

[1014] In certain embodiments, the Therapeutics of the invention are administered in combination with an anticoagulant. Anticoagulants that may be administered with the compositions of the invention include, but are not limited to, heparin, low molecular weight heparin, warfarin sodium (e.g., COUMADIN®), dicumarol, 4-hydroxycoumarin, anisindione (e.g., MIRADON™), acenocoumarol (e.g., nicoumalone, SINTHROME™), indan-1,3-dione, phenprocoumon (e.g., MARCUMAR™), ethyl biscoumacetate (e.g., TROMEXAN™), and aspirin. In a specific embodiment, compositions of the invention are administered in combination with heparin and/or warfarin. In another specific embodiment, compositions of the invention are administered in combination with warfarin. In another specific embodiment, compositions of the invention are administered in combination with warfarin and aspirin. In another specific embodiment, compositions of the invention are administered in combination with heparin. In another specific embodiment, compositions of the invention are administered in combination with heparin and aspirin.

[1015] In another embodiment, the Therapeutics of the invention are administered in combination with thrombolytic drugs. Thrombolytic drugs that may be administered with the compositions of the invention include, but are not limited to, plasminogen, lys-plasminogen, alpha2-antiplasmin, streptokinae (e.g., KABIKINASE™), antiresplace (e.g., EMINASE™), tissue plasminogen activator (t-PA, altevase, ACTIVASE™), urokinase (e.g., ABBOKINASE™), sauruplase, (Prourokinase, single chain urokinase), and aminocaproic acid (e.g., AMICAR™). In a specific embodiment, compositions of the invention are administered in combination with tissue plasminogen activator and aspirin.

[1016] In another embodiment, the Therapeutics of the invention are administered in combination with antiplatelet drugs. Antiplatelet drugs that may be administered with the compositions of the invention include, but are not limited to, aspirin, dipyridamole (e.g., PERSANTINE™), and ticlopidine (e.g., TICLID™).

[1017] In specific embodiments, the use of anti-coagulants, thrombolytic and/or antiplatelet drugs in combination with Therapeutics of the invention is contemplated for the prevention, diagnosis, and/or treatment of thrombosis, arterial thrombosis, venous thrombosis, thromboembolism, pulmonary embolism, atherosclerosis, myocardial infarction, transient ischemic attack, unstable angina. In specific embodiments, the use of anticoagulants, thrombolytic drugs and/or antiplatelet drugs in combination with Therapeutics of the invention is contemplated for the prevention of occulsion of saphenous grafts, for reducing the risk of periprocedural thrombosis as might accompany angioplasty procedures, for reducing the risk of stroke in patients with atrial fibrillation including nonrheumatic atrial fibrillation, for reducing the risk of embolism associated with mechanical heart valves and or mitral valves disease. Other uses for the therapeutics of the invention, alone or in combination with antiplatelet, anticoagulant, and/or thrombolytic drugs, include, but are not limited to, the prevention of occlusions in extracorporeal devices (e.g., intravascular canulas, vascular access shunts in hemodialysis patients, hemodialysis machines, and cardiopulmonary bypass machines).

[1018] In certain embodiments, Therapeutics of the invention are administered in combination with antiretroviral agents, nucleoside/nucleotide reverse transcriptase inhibitors (NRTIs), non-nucleoside reverse transcriptase inhibitors (NNRTIs), and/or protease inhibitors (Pis). NRTIs that may be administered in combination with the Therapeutics of the invention, include, but are not limited to, RETROVIR™ (zidovudine/AZT), VIDEX™ (didanosine/ddI), HIVID™ (zalcitabine/ddC), ZERIT™ (stavudine/d4T), EPIVIR™ (lamivudine/3TC), and COMBIVIR™ (zidovudine/lamivudine). NNRTIs that may be administered in combination with the Therapeutics of the invention, include, but are not limited to, VIRAMUNE™ (nevirapine), RESCRIPTOR™ (delavirdine), and SUSTIVA™ (efavirenz). Protease inhibitors that may be administered in combination with the Therapeutics of the invention, include, but are not limited to, CRIXIVAN™ (indinavir), NORVIR™ (ritonavir), INVIRASE™ (saquinavir), and VIRACEPT™ (nelfinavir). In a specific embodiment, antiretroviral agents, nucleoside reverse transcriptase inhibitors, non-nucleoside reverse transcriptase inhibitors, and/or protease inhibitors may be used in any combination with Therapeutics of the invention to treat AIDS and/or to prevent or treat HIV infection.

[1019] Additional NRTIs include LODENOSINE™ (F-ddA; an acid-stable adenosine NRTI; Triangle/Abbott; COVIRACIL™ (emtricitabine/FTC; structurally related to lamivudine (3TC) but with 3- to 10-fold greater activity in vitro; Triangle/Abbott); dOTC (BCH-10652, also structurally related to lamivudine but retains activity against a substantial proportion of lamivudine-resistant isolates; Biochem Pharma); Adefovir (refused approval for anti-HIV therapy by FDA; Gilead Sciences); PREVEON® (Adefovir Dipivoxil, the active prodrug of adefovir; its active form is PMEA-pp); TENOFOVIR™ (bis-POC PMPA, a PMPA prodrug; Gilead); DAPD/DXG (active metabolite of DAPD; Triangle/Abbott); D-D4FC (related to 3TC, with activity against AZT/3TC-resistant virus); GW420867X (Glaxo Wellcome); ZIAGEN™ (abacavir/159U89; Glaxo Wellcome Inc.); CS-87 (3′azido-2′,3′-dideoxyuridine; WO 99/66936); and S-acyl-2-thioethyl (SATE)-bearing prodrug forms of β-L-FD4C and β-L-FddC (WO 98/17281).

[1020] Additional NNRTIs include COACTINON™ (Emivirine/MKC-442, potent NNRTI of the HEPT class; Triangle/Abbott); CAPRAVIRINE™ (AG-1549/S-1153, a next generation NNRTI with activity against viruses containing the K103N mutation; Agouron); PNU-142721 (has 20- to 50-fold greater activity than its predecessor delavirdine and is active against K103N mutants; Pharmacia & Upjohn); DPC-961 and DPC-963 (second-generation derivatives of efavirenz, designed to be active against viruses with the K103N mutation; DuPont); GW-420867X (has 25-fold greater activity than HBY097 and is active against K103N mutants; Glaxo Wellcome); CALANOLIDE A (naturally occurring agent from the latex tree; active against viruses containing either or both the Y181C and K103N mutations); and Propolis (WO 99/49830).

[1021] Additional protease inhibitors include LOPINAVIR™ (ABT378/r; Abbott Laboratories); BMS-232632 (an azapeptide; Bristol-Myres Squibb); TIPRANAVIR™ (PNU-140690, a non-peptic dihydropyrone; Pharmacia & Upjohn); PD-178390 (a nonpeptidic dihydropyrone; Parke-Davis); BMS 232632 (an azapeptide; Bristol-Myers Squibb); L-756,423 (an indinavir analog; Merck); DMP-450 (a cyclic urea compound; Avid & DuPont); AG-1776 (a peptidomimetic with in vitro activity against protease inhibitor-resistant viruses; Agouron); VX-175/GW-433908 (phosphate prodrug of amprenavir; Vertex & Glaxo Welcome); CGP61755 (Ciba); and AGENERASE™ (amprenavir; Glaxo Wellcome Inc.).

[1022] Additional antiretroviral agents include fusion inhibitors/gp41 binders. Fusion inhibitors/gp4l binders include T-20 (a peptide from residues 643-678 of the HIV gp41 transmembrane protein ectodomain which binds to gp4l in its resting state and prevents transformation to the fusogenic state; Trimeris) and T-1249 (a second-generation fusion inhibitor; Trimeris).

[1023] Additional antiretroviral agents include fusion inhibitors/chemokine receptor antagonists. Fusion inhibitors/chemokine receptor antagonists include CXCR4 antagonists such as AMD 3100 (a bicyclam), SDF-1 and its analogs, and ALX40-4C (a cationic peptide), T22 (an 18 amino acid peptide; Trimeris) and the T22 analogs T134 and T140; CCR5 antagonists such as RANTES (9-68), AOP-RANTES, NNY-RANTES, and TAK-779; and CCR5/CXCR4 antagonists such as NSC 651016 (a distamycin analog). Also included are CCR2B, CCR3, and CCR6 antagonists. Chemokine recpetor agonists such as RANTES, SDF-1, MIP-1α, MIP-1β, etc., may also inhibit fusion.

[1024] Additional antiretroviral agents include integrase inhibitors. Integrase inhibitors include dicaffeoylquinic (DFQA) acids; L-chicoric acid (a dicaffeoyltartaric (DCTA) acid); quinalizarin (QLC) and related anthraquinones; ZINTEVIR™ (AR 177, an oligonucleotide that probably acts at cell surface rather than being a true integrase inhibitor; Arondex); and naphthols such as those disclosed in WO 98/50347.

[1025] Additional antiretroviral agents include hydroxyurea-like compunds such as BCX-34 (a purine nucleoside phosphorylase inhibitor; Biocryst); ribonucleotide reductase inhibitors such as DIDOX™ (Molecules for Health); inosine monophosphate dehydrogenase (IMPDH) inhibitors sucha as VX-497 (Vertex); and mycopholic acids such as CellCept (mycophenolate mofetil; Roche).

[1026] Additional antiretroviral agents include inhibitors of viral integrase, inhibitors of viral genome nuclear translocation such as arylene bis(methylketone) compounds; inhibitors of HIV entry such as AOP-RANTES, NNY-RANTES, RANTES-IgG fusion protein, soluble complexes of RANTES and glycosaminoglycans (GAG), and AMD-3100; nucleocapsid zinc finger inhibitors such as dithiane compounds; targets of HIV Tat and Rev; and pharmacoenhancers such as ABT-378.

[1027] Other antiretroviral therapies and adjunct therapies include cytokines and lymphokines such as MIP-1α, MIP-1β, SDF-1α, IL-2, PROLEUKIN™ (aldesleukin/L2-7001; Chiron), IL-4, IL-10, IL-12, and IL-13; interferons such as IFN-α2a; antagonists of TNFs, NFKB, GM-CSF, M-CSF, and IL-10; agents that modulate immune activation such as cyclosporin and prednisone; vaccines such as Remune™ (HIV Immunogen), APL 400-003 (Apollon), recombinant gp120 and fragments, bivalent (B/E) recombinant envelope glycoprotein, rgp120CM235, MN rgp120, SF-2 rgpl20, gp120/soluble CD4 complex, Delta JR-FL protein, branched synthetic peptide derived from discontinuous gp120 C3/C4 domain, fusion-competent immunogens, and Gag, Pol, Nef, and Tat vaccines; gene-based therapies such as genetic suppressor elements (GSEs; WO 98/54366), and intrakines (genetically modified CC chemokines targetted to the ER to block surface expression of newly synthesized CCR5 (Yang et al., PNAS 94:11567-72 (1997); Chen et al., Nat. Med. 3:1110⁻¹⁶ (1997)); antibodies such as the anti-CXCR4 antibody 12G5, the anti-CCR5 antibodies 2D7, 5C7, PA8, PA9, PA10, PA11, PA12, and PA14, the anti-CD4 antibodies Q4120 and RPA-T4, the anti-CCR3 antibody 7B11, the anti-gp120 antibodies 17b, 48d, 447-52D, 257-D, 268-D and 50.1, anti-Tat antibodies, anti-TNF-α antibodies, and monoclonal antibody 33A; aryl hydrocarbon (AH) receptor agonists and antagonists such as TCDD, 3,3′,4,4′,5-pentachlorobiphenyl, 3,3′,4,4′-tetrachlorobiphenyl, and a-naphthoflavone (WO 98/30213); and antioxidants such as γ-L-glutamyl-L-cysteine ethyl ester (y-GCE; WO 99/56764).

[1028] In a further embodiment, the Therapeutics of the invention are administered in combination with an antiviral agent. Antiviral agents that may be administered with the Therapeutics of the invention include, but are not limited to, acyclovir, ribavirin, amantadine, and remantidine.

[1029] In other embodiments, Therapeutics of the invention may be administered in combination with anti-opportunistic infection agents. Anti-opportunistic agents that may be administered in combination with the Therapeutics of the invention, include, but are not limited to, TRIMETHOPRIM-SULFAMETHOXAZOLE™, DAPSONE™, PENTAMIDINE™, ATOVAQUONE™, ISONIAZID™, RIFAMPIN™, PYRAZINAMIDE™, ETHAMBUTOL™, RIFABUTIN™, CLARITHROMYCIN™, AZITHROMYCIN™, GANCICLOVIR™, FOSCARNET™, CIDOFOVIR™, FLUCONAZOLE™, ITRACONAZOLE™, KETOCONAZOLE™, ACYCLOVIR™, FAMCICOLVIR™, PYRIMETHAMINE™, LEUCOVORIN™, NEUPOGEN™ (filgrastim/G-CSF), and LEUKINE™ (sargramostim/GM-CSF). In a specific embodiment, Therapeutics of the invention are used in any combination with TRIMETHOPRIM-SULFAMETHOXAZOLE™, DAPSONE™, PENTAMIDINE™, and/or ATOVAQUONE™ to prophylactically treat or prevent an opportunistic Pneumocystis carinii pneumonia infection. In another specific embodiment, Therapeutics of the invention are used in any combination with ISONIAZID™, RIFAMPIN™, PYRAZINAMIDE™, and/or ETHAMBUTOL™ to prophylactically treat or prevent an opportunistic Mycobacterium avium complex infection. In another specific embodiment, Therapeutics of the invention are used in any combination with RIFABUTIN™, CLARITHROMYCIN™, and/or AZITHROMYCIN™ to prophylactically treat or prevent an opportunistic Mycobacterium tuberculosis infection. In another specific embodiment, Therapeutics of the invention are used in any combination with GANCICLOVIR™, FOSCARNET™, and/or CIDOFOVIR™ to prophylactically treat or prevent an opportunistic cytomegalovirus infection. In another specific embodiment, Therapeutics of the invention are used in any combination with FLUCONAZOLE™, ITRACONAZOLE™, and/or KETOCONAZOLE™ to prophylactically treat or prevent an opportunistic fungal infection. In another specific embodiment, Therapeutics of the invention are used in any combination with ACYCLOVIR™ and/or FAMCICOLVIR™ to prophylactically treat or prevent an opportunistic herpes simplex virus type I and/or type II infection. In another specific embodiment, Therapeutics of the invention are used in any combination with PYRIMETHAMINE™ and/or LEUCOVORIN™ to prophylactically treat or prevent an opportunistic Toxoplasma gondii infection. In another specific embodiment, Therapeutics of the invention are used in any combination with LEUCOVORIN™ and/or NEUPOGEN™ to prophylactically treat or prevent an opportunistic bacterial infection.

[1030] In a further embodiment, the Therapeutics of the invention are administered in combination with an antibiotic agent. Antibiotic agents that may be administered with the Therapeutics of the invention include, but are not limited to, amoxicillin, beta-lactamases, aminoglycosides, beta-lactam (glycopeptide), beta-lactamases, Clindamycin, chloramphenicol, cephalosporins, ciprofloxacin, erythromycin, fluoroquinolones, macrolides, metronidazole, penicillins, quinolones, rapamycin, rifampin, streptomycin, sulfonamide, tetracyclines, trimethoprim, trimethoprim-sulfamethoxazole, and vancomycin.

[1031] In other embodiments, the Therapeutics of the invention are administered in combination with immunestimulants. Immunostimulants that may be administered in combination with the Therapeutics of the invention include, but are not limited to, levamisole (e.g., ERGAMISOL™), isoprinosine (e.g. INOSIPLEX™), interferons (e.g. interferon alpha), and interleukins (e.g., IL-2).

[1032] In other embodiments, Therapeutics of the invention are administered in combination with immunosuppressive agents. Immunosuppressive agents that may be administered in combination with the Therapeutics of the invention include, but are not limited to, steroids, cyclosporine, cyclosporine analogs, cyclophosphamide methylprednisone, prednisone, azathioprine, FK-506, 15-deoxyspergualin, and other immunosuppressive agents that act by suppressing the function of responding T cells. Other immunosuppressive agents that may be administered in combination with the Therapeutics of the invention include, but are not limited to, prednisolone, methotrexate, thalidomide, methoxsalen, rapamycin, leflunomide, mizoribine (BREDININ™), brequinar, deoxyspergualin, and azaspirane (SKF 105685), ORTHOCLONE OKT® 3 (muromonab-CD3), SANDIMMUNE™, NEORAL™, SANGDYA™ (cyclosporine), PROGRAF® (FK506, tacrolimus), CELLCEPT® (mycophenolate motefil, of which the active metabolite is mycophenolic acid), IMURAN™ (azathioprine), glucocorticosteroids, adrenocortical steroids such as DELTASONE™ (prednisone) and HYDELTRASOL™ (prednisolone), FOLEX™ and MEXATE™ (methotrxate), OXSORALEN-ULTRA™ (methoxsalen) and RAPAMUNE™ (sirolimus). In a specific embodiment, immunosuppressants may be used to prevent rejection of organ or bone marrow transplantation.

[1033] In an additional embodiment, Therapeutics of the invention are administered alone or in combination with one or more intravenous immune globulin preparations. Intravenous immune globulin preparations that may be administered with the Therapeutics of the invention include, but not limited to, GAMMAR™, IVEEGAM™, SANDOGLOBULIN™, GAMMAGARD S/D™, ATGAM™ (antithymocyte glubulin), and GAMIMUNE™. In a specific embodiment, Therapeutics of the invention are administered in combination with intravenous immune globulin preparations in transplantation therapy (e.g., bone marrow transplant).

[1034] In certain embodiments, the Therapeutics of the invention are administered alone or in combination with an anti-inflammatory agent. Anti-inflammatory agents that may be administered with the Therapeutics of the invention include, but are not limited to, corticosteroids (e.g. betamethasone, budesonide, cortisone, dexamethasone, hydrocortisone, methylprednisolone, prednisolone, prednisone, and triamcinolone), nonsteroidal anti-inflammatory drugs (e.g., diclofenac, diflunisal, etodolac, fenoprofen, floctafenine, flurbiprofen, ibuprofen, indomethacin, ketoprofen, meclofenamate, mefenamic acid, meloxicam, nabumetone, naproxen, oxaprozin, phenylbutazone, piroxicam, sulindac, tenoxicam, tiaprofenic acid, and tolmetin.), as well as antihistamines, aminoarylcarboxylic acid derivatives, arylacetic acid derivatives, arylbutyric acid derivatives, arylcarboxylic acids, arylpropionic acid derivatives, pyrazoles, pyrazolones, salicylic acid derivatives, thiazinecarboxamides, e-acetamidocaproic acid, S-adenosylmethionine, 3-amino-4-hydroxybutyric acid, amixetrine, bendazac, benzydamine, bucolome, difenpiramide, ditazol, emorfazone, guaiazulene, nabumetone, nimesulide, orgotein, oxaceprol, paranyline, perisoxal, pifoxime, proquazone, proxazole, and tenidap.

[1035] In an additional embodiment, the compositions of the invention are administered alone or in combination with an anti-angiogenic agent. Anti-angiogenic agents that may be administered with the compositions of the invention include, but are not limited to, Angiostatin (Entremed, Rockville, Md.), Troponin-l (Boston Life Sciences, Boston, Mass.), anti-Invasive Factor, retinoic acid and derivatives thereof, paclitaxel (Taxol), Suramin, Tissue Inhibitor of Metalloproteinase-1, Tissue Inhibitor of Metalloproteinase-2, VEGI, Plasminogen Activator Inhibitor-1, Plasminogen Activator Inhibitor-2, and various forms of the lighter “d group” transition metals.

[1036] Lighter “d group” transition metals include, for example, vanadium, molybdenum, tungsten, titanium, niobium, and tantalum species. Such transition metal species may form transition metal complexes. Suitable complexes of the above-mentioned transition metal species include oxo transition metal complexes.

[1037] Representative examples of vanadium complexes include oxo vanadium complexes such as vanadate and vanadyl complexes. Suitable vanadate complexes include metavanadate and orthovanadate complexes such as, for example, ammonium metavanadate, sodium metavanadate, and sodium orthovanadate. Suitable vanadyl complexes include, for example, vanadyl acetylacetonate and vanadyl sulfate including vanadyl sulfate hydrates such as vanadyl sulfate mono- and trihydrates.

[1038] Representative examples of tungsten and molybdenum complexes also include oxo complexes. Suitable oxo tungsten complexes include tungstate and tungsten oxide complexes. Suitable tungstate complexes include ammonium tungstate, calcium tungstate, sodium tungstate dihydrate, and tungstic acid. Suitable tungsten oxides include tungsten (IV) oxide and tungsten (VI) oxide. Suitable oxo molybdenum complexes include molybdate, molybdenum oxide, and molybdenyl complexes. Suitable molybdate complexes include ammonium molybdate and its hydrates, sodium molybdate and its hydrates, and potassium molybdate and its hydrates. Suitable molybdenum oxides include molybdenum (VI) oxide, molybdenum (VI) oxide, and molybdic acid. Suitable molybdenyl complexes include, for example, molybdenyl acetylacetonate. Other suitable tungsten and molybdenum complexes include hydroxo derivatives derived from, for example, glycerol, tartaric acid, and sugars.

[1039] A wide variety of other anti-angiogenic factors may also be utilized within the context of the present invention. Representative examples include, but are not limited to, platelet factor 4; protamine sulphate; sulphated chitin derivatives (prepared from queen crab shells), (Murata et al., Cancer Res. 51:22-26, (1991)); Sulphated Polysaccharide Peptidoglycan Complex (SP-PG) (the function of this compound may be enhanced by the presence of steroids such as estrogen, and tamoxifen citrate); Staurosporine; modulators of matrix metabolism, including for example, proline analogs, cishydroxyproline, d,L-3,4-dehydroproline, Thiaproline, alpha,alpha-dipyridyl, aminopropionitrile fumarate; 4-propyl-5-(4-pyridinyl)-2(3H)-oxazolone; Methotrexate; Mitoxantrone; Heparin; Interferons; 2 Macroglobulin-serum; ChIMP-3 (Pavloff et al., J. Bio. Chem. 267:17321-17326, (1992)); Chymostatin (Tomkinson et al., Biochem J. 286:475-480, (1992)); Cyclodextrin Tetradecasulfate; Eponemycin; Camptothecin; Fumagillin (Ingber et al., Nature 348:555-557, (1990)); Gold Sodium Thiomalate (“GST”; Matsubara and Ziff, J. Clin. Invest. 79:1440-1446, (1987)); anticollagenase-serum; alpha2-antiplasmin (Holmes et al., J. Biol. Chem. 262(4):1659-1664, (1987)); Bisantrene (National Cancer Institute); Lobenzarit disodium (N-(2)-carboxyphenyl-4-chloroanthronilic acid disodium or “CCA”; (Takeuchi et al., Agents Actions 36:312-316, (1992)); and metalloproteinase inhibitors such as BB94.

[1040] Additional anti-angiogenic factors that may also be utilized within the context of the present invention include Thalidomide, (Celgene, Warren, N.J.); Angiostatic steroid; AGM-1470 (H. Brem and J. Folkman J Pediatr. Surg. 28:445-51 (1993)); an integrin alpha v beta 3 antagonist (C. Storgard et al., J Clin. Invest. 103:47-54 (1999)); carboxynaminolmidazole; Carboxyamidotriazole (CAI) (National Cancer Institute, Bethesda, Md.); Conbretastatin A-4 (CA4P) (OXiGENE, Boston, MA); Squalamine (Magainin Pharmaceuticals, Plymouth Meeting, Pa.); TNP-470, (Tap Pharmaceuticals, Deerfield, Ill.); ZD-0101 AstraZeneca (London, UK); APRA (CT2584); Benefin, Byrostatin-1 (SC339555); CGP-41251 (PKC 412); CM101; Dexrazoxane (ICRF187); DMXAA; Endostatin; Flavopridiol; Genestein; GTE; ImmTher; Iressa (ZD1839); Octreotide (Somatostatin); Panretin; Penacillamine; Photopoint; PI-88; Prinomastat (AG-3340) Purlytin; Suradista (FCE26644); Tamoxifen (Nolvadex); Tazarotene; Tetrathiomolybdate; Xeloda (Capecitabine); and 5-Fluorouracil.

[1041] Anti-angiogenic agents that may be administed in combination with the compounds of the invention may work through a variety of mechanisms including, but not limited to, inhibiting proteolysis of the extracellular matrix, blocking the function of endothelial cell-extracellular matrix adhesion molecules, by antagonizing the function of angiogenesis inducers such as growth factors, and inhibiting integrin receptors expressed on proliferating endothelial cells. Examples of anti-angiogenic inhibitors that interfere with extracellular matrix proteolysis and which may be administered in combination with the compositons of the invention include, but are not Imited to, AG-3340 (Agouron, La Jolla, Calif.), BAY-12-9566 (Bayer, West Haven, Conn.), BMS-275291 (Bristol Myers Squibb, Princeton, N.J.), CGS-27032A (Novartis, East Hanover, N.J.), Marimastat (British Biotech, Oxford, UK), and Metastat (Aeterna, St-Foy, Quebec). Examples of anti-angiogenic inhibitors that act by blocking the function of endothelial cell-extracellular matrix adhesion molecules and which may be administered in combination with the compositons of the invention include, but are not Imited to, EMD-121974 (Merck KcgaA Darmstadt, Germany) and Vitaxin (Ixsys, La Jolla, Calif./Medimmune, Gaithersburg, Md.). Examples of anti-angiogenic agents that act by directly antagonizing or inhibiting angiogenesis inducers and which may be administered in combination with the compositons of the invention include, but are not Imited to, Angiozyme (Ribozyme, Boulder, CO), Anti-VEGF antibody (Genentech, S. San Francisco, Calif.), PTK-787/ZK-225846 (Novartis, Basel, Switzerland), SU-101 (Sugen, S. San Francisco, Calif.), SU-5416 (Sugen/Pharmacia Upjohn, Bridgewater, N.J.), and SU-6668 (Sugen). Other anti-angiogenic agents act to indirectly inhibit angiogenesis. Examples of indirect inhibitors of angiogenesis which may be administered in combination with the compositons of the invention include, but are not limited to, IM-862 (Cytran, Kirkland, Wash.), Interferon-alpha, IL-12 (Roche, Nutley, N.J.), and Pentosan polysulfate (Georgetown University, Washington, D.C.).

[1042] In particular embodiments, the use of compositions of the invention in combination with anti-angiogenic agents is contemplated for the treatment, prevention, and/or amelioration of an autoimmune disease, such as for example, an autoimmune disease described herein.

[1043] In a particular embodiment, the use of compositions of the invention in combination with anti-angiogenic agents is contemplated for the treatment, prevention, and/or amelioration of arthritis. In a more particular embodiment, the use of compositions of the invention in combination with anti-angiogenic agents is contemplated for the treatment, prevention, and/or amelioration of rheumatoid arthritis.

[1044] In another embodiment, the polynucleotides encoding a polypeptide of the present invention are administered in combination with an angiogenic protein, or polynucleotides encoding an angiogenic protein. Examples of angiogenic proteins that may be administered with the compositions of the invention include, but are not limited to, acidic and basic fibroblast growth factors, VEGF-1, VEGF-2, VEGF-3, epidermal growth factor alpha and beta, platelet-derived endothelial cell growth factor, platelet-derived growth factor, tumor necrosis factor alpha, hepatocyte growth factor, insulin-like growth factor, colony stimulating factor, macrophage colony stimulating factor, granulocyte/macrophage colony stimulating factor, and nitric oxide synthase.

[1045] In additional embodiments, compositions of the invention are administered in combination with a chemotherapeutic agent. Chemotherapeutic agents that may be administered with the Therapeutics of the invention include, but are not limited to alkylating agents such as nitrogen mustards (for example, Mechlorethamine, cyclophosphamide, Cyclophosphamide Ifosfamide, Melphalan (L-sarcolysin), and Chlorambucil), ethylenimines and methylmelamines (for example, Hexamethylmelamine and Thiotepa), alkyl sulfonates (for example, Busulfan), nitrosoureas (for example, Carmustine (BCNU), Lomustine (CCNU), Semustine (methyl-CCNU), and Streptozocin (streptozotocin)), triazenes (for example, Dacarbazine (DTIC; dimethyltriazenoimidazolecarboxamide)), folic acid analogs (for example, Methotrexate (amethopterin)), pyrimidine analogs (for example, Fluorouacil (5-fluorouracil; 5-FU), Floxuridine (fluorodeoxyuridine; FudR), and Cytarabine (cytosine arabinoside)), purine analogs and related inhibitors (for example, Mercaptopurine (6-mercaptopurine; 6-MP), Thioguanine (6-thioguanine; TG), and Pentostatin (2′-deoxycoformycin)), vinca alkaloids (for example, Vinblastine (VLB, vinblastine sulfate)) and Vincristine (vincristine sulfate)), epipodophyllotoxins (for example, Etoposide and Teniposide), antibiotics (for example, Dactinomycin (actinomycin D), Daunorubicin (daunomycin; rubidomycin), Doxorubicin, Bleomycin, Plicamycin (mithramycin), and Mitomycin (mitomycin C), enzymes (for example, L-Asparaginase), biological response modifiers (for example, Interferon-alpha and interferon-alpha-2b), platinum coordination compounds (for example, Cisplatin (cis-DDP) and Carboplatin), anthracenedione (Mitoxantrone), substituted ureas (for example, Hydroxyurea), methylhydrazine derivatives (for example, Procarbazine (N-methylhydrazine; MIH), adrenocorticosteroids (for example, Prednisone), progestins (for example, Hydroxyprogesterone caproate, Medroxyprogesterone, Medroxyprogesterone acetate, and Megestrol acetate), estrogens (for example, Diethylstilbestrol (DES), Diethylstilbestrol diphosphate, Estradiol, and Ethinyl estradiol), antiestrogens (for example, Tamoxifen), androgens (Testosterone proprionate, and Fluoxymesterone), antiandrogens (for example, Flutamide), gonadotropin-releasing horomone analogs (for example, Leuprolide), other hormones and hormone analogs (for example, methyltestosterone, estramustine, estramustine phosphate sodium, chlorotrianisene, and testolactone), and others (for example, dicarbazine, glutamic acid, and mitotane).

[1046] In one embodiment, the compositions of the invention are administered in combination with one or more of the following drugs: infliximab (also known as Remicade™ Centocor, Inc.), Trocade (Roche, RO-32-3555), Leflunomide (also known as Arava™ from Hoechst Marion Roussel), Kineret™ (an IL-1 Receptor antagonist also known as Anakinra from Amgen, Inc.)

[1047] In a specific embodiment, compositions of the invention are administered in combination with CHOP (cyclophosphamide, doxorubicin, vincristine, and prednisone) or combination of one or more of the components of CHOP. In one embodiment, the compositions of the invention are administered in combination with anti-CD20 antibodies, human monoclonal anti-CD20 antibodies. In another embodiment, the compositions of the invention are administered in combination with anti-CD20 antibodies and CHOP, or anti-CD20 antibodies and any combination of one or more of the components of CHOP, particularly cyclophosphamide and/or prednisone. In a specific embodiment, compositions of the invention are administered in combination with Rituximab. In a further embodiment, compositions of the invention are administered with Rituximab and CHOP, or Rituximab and any combination of one or more of the components of CHOP, particularly cyclophosphamide and/or prednisone. In a specific embodiment, compositions of the invention are administered in combination with tositumomab. In a further embodiment, compositions of the invention are administered with tositumomab and CHOP, or tositumomab and any combination of one or more of the components of CHOP, particularly cyclophosphamide and/or prednisone. The anti-CD20 antibodies may optionally be associated with radioisotopes, toxins or cytotoxic prodrugs.

[1048] In another specific embodiment, the compositions of the invention are administered in combination Zevalin™. In a further embodiment, compositions of the invention are administered with Zevalin™ and CHOP, or Zevalin™ and any combination of one or more of the components of CHOP, particularly cyclophosphamide and/or prednisone. Zevalin™ may be associated with one or more radisotopes. Particularly preferred isotopes are ⁹⁰Y and ¹¹¹In.

[1049] In an additional embodiment, the Therapeutics of the invention are administered in combination with cytokines. Cytokines that may be administered with the Therapeutics of the invention include, but are not limited to, IL2, IL3, IL4, IL5, IL6, IL7, IL10, IL12, IL13, IL15, anti-CD40, CD40L, IFN-gamma and TNF-alpha. In another embodiment, Therapeutics of the invention may be administered with any interleukin, including, but not limited to, IL-lalpha, IL-Ibeta, IL-2, IL-3, IL-4, IL-5, IL-6, IL-7, IL-8, IL-9, IL-10, IL-lI, IL-12, IL-13, IL-14, IL-15, IL-16, IL-17, IL-18, IL-19, IL-20, and IL-21.

[1050] In one embodiment, the Therapeutics of the invention are administered in combination with members of the TNF family. TNF, TNF-related or TNF-like molecules that may be administered with the Therapeutics of the invention include, but are not limited to, soluble forms of TNF-alpha, lymphotoxin-alpha (LT-alpha, also known as TNF-beta), LT-beta (found in complex heterotrimer LT-alpha2-beta), OPGL, FasL, CD27L, CD30L, CD40L, 4-1BBL, DcR3, OX40L, TNF-gamma (International Publication No. WO 96/14328), AIM-I (International Publication No. WO 97/33899), endokine-alpha (International Publication No. WO 98/07880), OPG, and neutrokine-alpha (International Publication No. WO 98/18921, OX40, and nerve growth factor (NGF), and soluble forms of Fas, CD30, CD27, CD40 and 4-IBB, TR2 (International Publication No. WO 96/34095), DR3 (International Publication No. WO 97/33904), DR4 (International Publication No. WO 98/32856), TR5 (International Publication No. WO 98/30693), TRANK, TR9 (International Publication No. WO 98/56892),TR10 (International Publication No. WO 98/54202), 312C2 (International Publication No. WO 98/06842), and TR12, and soluble forms CD154, CD70, and CD153.

[1051] In an additional embodiment, the Therapeutics of the invention are administered in combination with angiogenic proteins. Angiogenic proteins that may be administered with the Therapeutics of the invention include, but are not limited to, Glioma Derived Growth Factor (GDGF), as disclosed in European Patent Number EP-399816; Platelet Derived Growth Factor-A (PDGF-A), as disclosed in European Patent Number EP-6821 10; Platelet Derived Growth Factor-B (PDGF-B), as disclosed in European Patent Number EP-282317; Placental Growth Factor (PlGF), as disclosed in International Publication Number WO 92/06194; Placental Growth Factor-2 (PIGF-2), as disclosed in Hauser et al., Growth Factors, 4:259-268 (1993); Vascular Endothelial Growth Factor (VEGF), as disclosed in International Publication Number WO 90/13649; Vascular Endothelial Growth Factor-A (VEGF-A), as disclosed in European Patent Number EP-506477; Vascular Endothelial Growth Factor-2 (VEGF-2), as disclosed in International Publication Number WO 96/39515; Vascular Endothelial Growth Factor B (VEGF-3); Vascular Endothelial Growth Factor B-1 86 (VEGF-B 186), as disclosed in International Publication Number WO 96/26736; Vascular Endothelial Growth Factor-D (VEGF-D), as disclosed in International Publication Number WO 98/02543; Vascular Endothelial Growth Factor-D (VEGF-D), as disclosed in International Publication Number WO 98/07832; and Vascular Endothelial Growth Factor-E (VEGF-E), as disclosed in German Patent Number DE19639601. The above mentioned references are herein incorporated by reference in their entireties.

[1052] In an additional embodiment, the Therapeutics of the invention are administered in combination with Fibroblast Growth Factors. Fibroblast Growth Factors that may be administered with the Therapeutics of the invention include, but are not limited to, FGF-1, FGF-2, FGF-3, FGF-4, FGF-5, FGF-6, FGF-7, FGF-8, FGF-9, FGF-10, FGF-l 1, FGF-12, FGF-13, FGF-14, and FGF-15.

[1053] In an additional embodiment, the Therapeutics of the invention are administered in combination with hematopoietic growth factors. Hematopoietic growth factors that may be administered with the Therapeutics of the invention include, but are not limited to, granulocyte macrophage colony stimulating factor (GM-CSF) (sargramostim, LEUKINE™, PROKINE™), granulocyte colony stimulating factor (G-CSF) (filgrastim, NEUPOGEN™), macrophage colony stimulating factor (M-CSF, CSF-1) erythropoietin (epoetin alfa, EPOGEN™, PROCRIT™), stem cell factor (SCF, c-kit ligand, steel factor), megakaryocyte colony stimulating factor, PIXY321 (a GMCSF/IL-3 fusion protein), interleukins, especially any one or more of IL-I through IL-12, interferon-gamma, or thrombopoietin.

[1054] In certain embodiments, Therapeutics of the present invention are administered in combination with adrenergic blockers, such as, for example, acebutolol, atenolol, betaxolol, bisoprolol, carteolol, labetalol, metoprolol, nadolol, oxprenolol, penbutolol, pindolol, propranolol, sotalol, and timolol.

[1055] In another embodiment, the Therapeutics of the invention are administered in combination with an antiarrhythmic drug (e.g., adenosine, amidoarone, bretylium, digitalis, digoxin, digitoxin, diliazem, disopyramide, esmolol, flecainide, lidocaine, mexiletine, moricizine, phenytoin, procainamide, N-acetyl procainamide, propafenone, propranolol, quinidine, sotalol, tocainide, and verapamil).

[1056] In another embodiment, the Therapeutics of the invention are administered in combination with diuretic agents, such as carbonic anhydrase-inhibiting agents (e.g., acetazolamide, dichlorphenamide, and methazolamide), osmotic diuretics (e.g., glycerin, isosorbide, mannitol, and urea), diuretics that inhibit Na⁺-K⁺-2Cl⁻ symport (e.g., furosemide, bumetanide, azosemide, piretanide, tripamide, ethacrynic acid, muzolimine, and torsemide), thiazide and thiazide-like diuretics (e.g., bendroflumethiazide, benzthiazide, chlorothiazide, hydrochlorothiazide, hydroflumethiazide, methyclothiazide, polythiazide, trichormethiazide, chlorthalidone, indapamide, metolazone, and quinethazone), potassium sparing diuretics (e.g., amiloride and triamterene), and mineralcorticoid receptor antagonists (e.g., spironolactone, canrenone, and potassium canrenoate).

[1057] In one embodiment, the Therapeutics of the invention are administered in combination with treatments for endocrine and/or hormone imbalance disorders. Treatments for endocrine and/or hormone imbalance disorders include, but are not limited to, ¹²⁷I, radioactive isotopes of iodine such as ¹³¹ I and ¹²³I; recombinant growth hormone, such as HUMATROPE™ (recombinant somatropin); growth hormone analogs such as PROTROPIN™ (somatrem); dopamine agonists such as PARLODEL™ (bromocriptine); somatostatin analogs such as SANDOSTATIN™ (octreotide); gonadotropin preparations such as PREGNYL™, A.P.L.™ and PROFASI™ (chorionic gonadotropin (CG)), PERGONAL™ (menotropins), and METRODIN™ (urofollitropin (uFSH)); synthetic human gonadotropin releasing hormone preparations such as FACTREL™ and LUTREPULSE™ (gonadorelin hydrochloride); synthetic gonadotropin agonists such as LUPRON™ (leuprolide acetate), SUPPRELIN™ (histrelin acetate), SYNAREL™ (nafarelin acetate), and ZOLADEX™ (goserelin acetate); synthetic preparations of thyrotropin-releasing hormone such as RELEFACT TRH™ and THYPINONE™ (protirelin); recombinant human TSH such as THYROGEN™; synthetic preparations of the sodium salts of the natural isomers of thyroid hormones such as L-T₄™, SYNTHROID™ and LEVOTHROID™ (levothyroxine sodium), L-T₃™, CYTOMEL™ and TRIOSTAT™ (liothyroine sodium), and THYROLAR™ (liotrix); antithyroid compounds such as 6-n-propylthiouracil (propylthiouracil), 1-methyl-2-mercaptoimidazole and TAPAZOLE™ (methimazole), NEO-MERCAZOLE™ (carbimazole); beta-adrenergic receptor antagonists such as propranolol and esmolol; Ca²⁺ channel blockers; dexamethasone and iodinated radiological contrast agents such as TELEPAQUE™ (iopanoic acid) and ORAGRAFIN™ (sodium ipodate).

[1058] Additional treatments for endocrine and/or hormone imbalance disorders include, but are not limited to, estrogens or congugated estrogens such as ESTRACE™ (estradiol), ESTINYL™ (ethinyl estradiol), PREMARIN™, ESTRATAB™, ORTHO-EST™, OGEN™ and estropipate (estrone), ESTROVIS™ (quinestrol), ESTRADERM™ (estradiol), DELESTROGEN™ and VALERGEN™ (estradiol valerate), DEPO-ESTRADIOL CYPIONATE™ and ESTROJECT LA™ (estradiol cypionate); antiestrogens such as NOLVADEX™ (tamoxifen), SEROPHENE™ and CLOMID™ (clomiphene); progestins such as DURALUTIN™ (hydroxyprogesterone caproate), MPA™ and DEPO-PROVERA™ (medroxyprogesterone acetate), PROVERA™ and CYCRIN™ (MPA), MEGACE™ (megestrol acetate), NORLUTIN™ (norethindrone), and NORLUTATE™ and AYGESTIN™ (norethindrone acetate); progesterone implants such as NORPLANT SYSTEM™ (subdermal implants of norgestrel); antiprogestins such as RU 486™ (mifepristone); hormonal contraceptives such as ENOVID™ (norethynodrel plus mestranol), PROGESTASERT™ (intrauterine device that releases progesterone), LOESTRIN™, BREVICON™, MODICON™, GENORA™, NELONA™, NORINYL™, OVACON-35™ and OVACON-50™ (ethinyl estradiol/norethindrone), LEVLEN™, NORDETTE™, TRI-LEVLEN™ and TRIPHASIL-21 ™ (ethinyl estradiol/levonorgestrel) LO/OVRAL™ and OVRAL™ (ethinyl estradiol/norgestrel), DEMULEN™ (ethinyl estradiol/ethynodiol diacetate), NORINYL™, ORTHO-NOVUM™, NORETHIN™, GENORA™, and NELOVA™ (norethindrone/mestranol), DESOGEN™ and ORTHO-CEPT™ (ethinyl estradiol/desogestrel), ORTHO-CYCLEN™ and ORTHO-TRICYCLEN™ (ethinyl estradiol/norgestimate), MICRONOR™ and NOR-QD™ (norethindrone), and OVRETTE™ (norgestrel).

[1059] Additional treatments for endocrine and/or hormone imbalance disorders include, but are not limited to, testosterone esters such as methenolone acetate and testosterone undecanoate; parenteral and oral androgens such as TESTOJECT-50™ (testosterone), TESTEX™ (testosterone propionate), DELATESTRYL™ (testosterone enanthate), DEPO-TESTOSTERONE™ (testosterone cypionate), DANOCRINE™ (danazol), HALOTESTIN™ (fluoxymesterone), ORETON METHYL , TESTRED m and VIRILON™ (methyltestosterone), and OXANDRIN™ (oxandrolone); testosterone transdermal systems such as TESTODERM™; androgen receptor antagonist and 5-alpha-reductase inhibitors such as ANDROCUR™ (cyproterone acetate), EULEXIN™ (flutamide), and PROSCAR™ (finasteride); adrenocorticotropic hormone preparations such as CORTROSYN™ (cosyntropin); adrenocortical steroids and their synthetic analogs such as ACLOVATE™ (alclometasone dipropionate), CYCLOCORT™ (amcinonide), BECLOVENT™ and VANCERIL™ (beclomethasone dipropionate), CELESTONE™ (betamethasone), BENISONE™ and UTICORT™ (betamethasone benzoate), DIPROSONE™ (betamethasone dipropionate), CELESTONE PHOSPHATE™ (betamethasone sodium phosphate), CELESTONE SOLUSPAN™ (betamethasone sodium phosphate and acetate), BETA-VAL™ and VALISONE™ (betamethasone valerate), TEMOVATETM (clobetasol propionate), CLODERM™ (clocortolone pivalate), CORTEF™ and HYDROCORTONE™ (cortisol (hydrocortisone)), HYDROCORTONE ACETATE ™ (cortisol (hydrocortisone) acetate), LOCOID™ (cortisol (hydrocortisone) butyrate), HYDROCORTONE PHOSPHATE™ (cortisol (hydrocortisone) sodium phosphate), A-HYDROCORT™ and SOLU CORTEF™ (cortisol (hydrocortisone) sodium succinate), WESTCORT™ (cortisol (hydrocortisone) valerate), CORTISONE ACETATE™ (cortisone acetate), DESOWEN™ and TRIDESILON™ (desonide), TOPICORT™ (desoximetasone), DECADRON™ (dexamethasone), DECADRON LA™ (dexamethasone acetate), DECADRON PHOSPHATE™ and HEXADROL PHOSPHATE™ (dexamethasone sodium phosphate), FLORONE™ and MAXIFLOR™ (diflorasone diacetate), FLORINEF ACETATE™ (fludrocortisone acetate), AEROBID™ and NASALIDE™ (flunisolide), FLUONID™ and SYNALAR™ (fluocinolone acetonide), LIDEXT™ (fluocinonide), FLUOR-OPT™ and FML™ (fluorometholone), CORDRAN™ (flurandrenolide), HALOG™ (halcinonide), HMS LIZUIFILM™ (medrysone), MEDROL™ (methylprednisolone), DEPO-MEDROL™ and MEDROL ACETATE™ (methylprednisone acetate), A-METHAPRED™ and SOLUMEDROL™ (methylprednisolone sodium succinate), ELOCON™ (mometasone furoate), HALDRONE™ (paramethasone acetate), DELTA-CORTEF™ (prednisolone), ECONOPRED™ (prednisolone acetate), HYDELTRASOL™ (prednisolone sodium phosphate), HYDELTRA-T.B.A™ (prednisolone tebutate), DELTASONE™ (prednisone), ARISTOCORT™ and KENACORT™ (triamcinolone), KENALOG™ (triamcinolone acetonide), ARISTOCORT™ and KENACORT DIACETATE™ (triamcinolone diacetate), and ARISTOSPAN™ (triamcinolone hexacetonide); inhibitors of biosynthesis and action of adrenocortical steroids such as CYTADREN™ (aminoglutethimide), NIZORAL™ (ketoconazole), MODRASTANE™ (trilostane), and METOPIRONE™ (metyrapone); bovine, porcine or human insulin or mixtures thereof; insulin analogs; recombinant human insulin such as HUMULIN™ and NOVOLIN™; oral hypoglycemic agents such as ORAMIDE™ and ORINASE™ (tolbutamide), DIABINESE™ (chlorpropamide), TOLAMIDE™ and TOLINASE™ (tolazamide), DYMELOR™ (acetohexamide), glibenclamide, MICRONASE™, DIBETA™ and GLYNASE™ (glyburide), GLUCOTROL™ (glipizide), and DIAMICRON™ (gliclazide), GLUCOPHAGE™ (metformin), ciglitazone, pioglitazone, and alpha-glucosidase inhibitors; bovine or porcine glucagon; somatostatins such as SANDOSTATIN™ (octreotide); and diazoxides such as PROGLYCEM™ (diazoxide).

[1060] In one embodiment, the Therapeutics of the invention are administered in combination with treatments for uterine motility disorders. Treatments for uterine motility disorders include, but are not limited to, estrogen drugs such as conjugated estrogens (e.g., PREMARIN® and ESTRATAB®), estradiols (e.g., CLIMARA® and ALORA®), estropipate, and chlorotrianisene; progestin drugs (e.g., AMEN® (medroxyprogesterone), MICRONOR® (norethidrone acetate), PROMETRIUM® progesterone, and megestrol acetate); and estrogen/progesterone combination therapies such as, for example, conjugated estrogens/medroxyprogesterone (e.g., PREMPRO™ and PREMPHASE®) and norethindrone acetate/ethinyl estsradiol (e.g., FEMHRT™),

[1061] In an additional embodiment, the Therapeutics of the invention are administered in combination with drugs effective in treating iron deficiency and hypochromic anemias, including but not limited to, ferrous sulfate (iron sulfate, FEOSOL™), ferrous fumarate (e.g., FEOSTAT™), ferrous gluconate (e.g., FERGON™), polysaccharide-iron complex (e.g., NIFEREX™), iron dextran injection (e.g., INFED™), cupric sulfate, pyroxidine, riboflavin, Vitamin B₁₂, cyancobalamin injection (e.g., REDISOL™, RUBRAMIN PC™), hydroxocobalamin, folic acid (e.g., FOLVITE™), leucovorin (folinic acid, 5-CHOH4PteGlu, citrovorum factor) or WELLCOVORIN (Calcium salt of leucovorin), transferrin or ferritin.

[1062] In certain embodiments, the Therapeutics of the invention are administered in combination with agents used to treat psychiatric disorders. Psychiatric drugs that may be administered with the Therapeutics of the invention include, but are not limited to, antipsychotic agents (e.g., chlorpromazine, chlorprothixene, clozapine, fluphenazine, haloperidol, loxapine, mesoridazine, molindone, olanzapine, perphenazine, pimozide, quetiapine, risperidone, thioridazine, thiothixene, trifluoperazine, and triflupromazine), antimanic agents (e.g., carbamazepine, divalproex sodium, lithium carbonate, and lithium citrate), antidepressants (e.g., amitriptyline, amoxapine, bupropion, citalopram, clomipramine, desipramine, doxepin, fluvoxamine, fluoxetine, imipramine, isocarboxazid, maprotiline, mirtazapine, nefazodone, nortriptyline, paroxetine, phenelzine, protriptyline, sertraline, tranylcypromine, trazodone, trimipramine, and venlafaxine), antianxiety agents (e.g., alprazolam, buspirone, chlordiazepoxide, clorazepate, diazepam, halazepam, lorazepam, oxazepam, and prazepam), and stimulants (e.g., d-amphetamine, methylphenidate, and pemoline).

[1063] In other embodiments, the Therapeutics of the invention are administered in combination with agents used to treat neurological disorders. Neurological agents that may be administered with the Therapeutics of the invention include, but are not limited to, antiepileptic agents (e.g., carbamazepine, clonazepam, ethosuximide, phenobarbital, phenytoin, primidone, valproic acid, divalproex sodium, felbamate, gabapentin, lamotrigine, levetiracetam, oxcarbazepine, tiagabine, topiramate, zonisamide, diazepam, lorazepam, and clonazepam), antiparkinsonian agents (e.g., levodopa/carbidopa, selegiline, amantidine, bromocriptine, pergolide, ropinirole, pramipexole, benztropine; biperiden; ethopropazine; procyclidine; trihexyphenidyl, tolcapone), and ALS therapeutics (e.g. riluzole).

[1064] In another embodiment, Therapeutics of the invention are administered in combination with vasodilating agents and/or calcium channel blocking agents. Vasodilating agents that may be administered with the Therapeutics of the invention include, but are not limited to, Angiotensin Converting Enzyme (ACE) inhibitors (e.g., papaverine, isoxsuprine, benazepril, captopril, cilazapril, enalapril, enalaprilat, fosinopril, lisinopril, moexipril, perindopril, quinapril, ramipril, spirapril, trandolapril, and nylidrin), and nitrates (e.g., isosorbide dinitrate, isosorbide mononitrate, and nitroglycerin). Examples of calcium channel blocking agents that may be administered in combination with the Therapeutics of the invention include, but are not limited to amlodipine, bepridil, diltiazem, felodipine, flunarizine, isradipine, nicardipine, nifedipine, nimodipine, and verapamil.

[1065] In certain embodiments, the Therapeutics of the invention are administered in combination with treatments for gastrointestinal disorders. Treatments for gastrointestinal disorders that may be administered with the Therapeutic of the invention include, but are not limited to, H₂ histamine receptor antagonists (e.g., TAGAMET™ (cimetidine), ZANTAC™ (ranitidine), PEPCID™ (famotidine), and AXID™ (nizatidine)); inhibitors of H⁺, K⁺ ATPase (e.g., PREVACID™ (lansoprazole) and PRILOSEC™ (omeprazole)); Bismuth compounds (e.g., PEPTO-BISMOL™ (bismuth subsalicylate) and DE-NOL™ (bismuth subcitrate)); various antacids; sucralfate; prostaglandin analogs (e.g. CYTOTEC™ (misoprostol)); muscarinic cholinergic antagonists; laxatives (e.g., surfactant laxatives, stimulant laxatives, saline and osmotic laxatives); antidiarrheal agents (e.g., LOMOTIL™ (diphenoxylate), MOTOFEN™ (diphenoxin), and IMODIUM™ (loperamide hydrochloride)), synthetic analogs of somatostatin such as SANDOSTATIN™ (octreotide), antiemetic agents (e.g., ZOFRAN™ (ondansetron), KYTRIL™ (granisetron hydrochloride), tropisetron, dolasetron, metoclopramide, chlorpromazine, perphenazine, prochlorperazine, promethazine, thiethylperazine, triflupromazine, domperidone, haloperidol, droperidol, trimethobenzamide, dexamethasone, methylprednisolone, dronabinol, and nabilone); D2 antagonists (e.g., metoclopramide, trimethobenzamide and chlorpromazine); bile salts; chenodeoxycholic acid; ursodeoxycholic acid; and pancreatic enzyme preparations such as pancreatin and pancrelipase.

[1066] In additional embodiments, the Therapeutics of the invention are administered in combination with other therapeutic or prophylactic regimens, such as, for example, radiation therapy.

### Example 14

### Method of Treating Decreased Levels of the Polypeptide

[1067] The present invention relates to a method for treating an individual in need of an increased level of a polypeptide of the invention in the body comprising administering to such an individual a composition comprising a therapeutically effective amount of an agonist of the invention (including polypeptides of the invention). Moreover, it will be appreciated that conditions caused by a decrease in the standard or normal expression level of a polypeptide of the present invention in an individual can be treated by administering the agonist or antagonist of the present invention. Thus, the invention also provides a method of treatment of an individual in need of an increased level of the polypeptide comprising administering to such an individual a Therapeutic comprising an amount of the agonist or antagonist to increase the activity level of the polypeptide in such an individual.

[1068] For example, a patient with decreased levels of a polypeptide receives a daily dose 0.1-100 uglkg of the agonist or antagonist for six consecutive days. The exact details of the dosing scheme, based on administration and formulation, are provided in Example 13.

### Example 15

### Method of Treating Increased Levels of the Polypeptide

[1069] The present invention also relates to a method of treating an individual in need of a decreased level of a polypeptide of the invention in the body comprising administering to such an individual a composition comprising a therapeutically effective amount of an antagonist of the invention (including polypeptides and antibodies of the invention).

[1070] In one example, antisense technology is used to inhibit production of a polypeptide of the present invention. This technology is one example of a method of decreasing levels of a polypeptide, due to a variety of etiologies, such as cancer.

[1071] For example, a patient diagnosed with abnormally increased levels of a polypeptide is administered intravenously antisense polynucleotides at 0.5, 1.0, 1.5, 2.0 and 3.0 mg/kg day for 21 days. This treatment is repeated after a 7-day rest period if the treatment was well tolerated. The antisense polynucleotides of the present invention can be formulated using techniques and formulations described herein (e.g. see Example 13), or otherwise known in the art.

### Example 16

### Method of Treatment Using Gene Therapy-ex vivo

[1072] One method of gene therapy transplants fibroblasts, which are capable of expressing a polypeptide, onto a patient. Generally, fibroblasts are obtained from a subject by skin biopsy. The resulting tissue is placed in tissue-culture medium and separated into small pieces. Small chunks of the tissue are placed on a wet surface of a tissue culture flask, approximately ten pieces are placed in each flask. The flask is turned upside down, closed tight and left at room temperature over night. After 24 hours at room temperature, the flask is inverted and the chunks of tissue remain fixed to the bottom of the flask and fresh media (e.g., Ham's F12 media, with 10% FBS, penicillin and streptomycin) is added. The flasks are then incubated at 37 degree C. for approximately one week.

[1073] At this time, fresh media is added and subsequently changed every several days. After an additional two weeks in culture, a monolayer of fibroblasts emerge. The monolayer is trypsinized and scaled into larger flasks.

[1074] pMV-7 (Kirschmeier, P.T. et al., DNA, 7:219-25 (1988)), flanked by the long terminal repeats of the Moloney murine sarcoma virus, is digested with EcoRI and HindIII and subsequently treated with calf intestinal phosphatase. The linear vector is fractionated on agarose gel and purified, using glass beads.

[1075] The cDNA encoding a polypeptide of the present invention can be amplified using PCR primers which correspond to the 5′ and 3′ end sequences respectively as set forth in Example 1 using primers and having appropriate restriction sites and initiation/stop codons, if necessary. Preferably, the 5′ primer contains an EcoRi site and the 3′ primer includes a HindIII site. Equal quantities of the Moloney murine sarcoma virus linear backbone and the amplified EcoRI and HindIII fragment are added together, in the presence of T4 DNA ligase. The resulting mixture is maintained under conditions appropriate for ligation of the two fragments. The ligation mixture is then used to transform bacteria HB101, which are then plated onto agar containing kanamycin for the purpose of confirming that the vector has the gene of interest properly inserted.

[1076] The amphotropic pA317 or GP+am12 packaging cells are grown in tissue culture to confluent density in Dulbecco's Modified Eagles Medium (DMEM) with 10% calf serum (CS), penicillin and streptomycin. The MSV vector containing the gene is then added to the media and the packaging cells transduced with the vector. The packaging cells now produce infectious viral particles containing the gene (the packaging cells are now referred to as producer cells).

[1077] Fresh media is added to the transduced producer cells, and subsequently, the media is harvested from a 10 cm plate of confluent producer cells. The spent media, containing the infectious viral particles, is filtered through a millipore filter to remove detached producer cells and this media is then used to infect fibroblast cells. Media is removed from a sub-confluent plate of fibroblasts and quickly replaced with the media from the producer cells. This media is removed and replaced with fresh media. If the titer of virus is high, then virtually all fibroblasts will be infected and no selection is required. If the titer is very low, then it is necessary to use a retroviral vector that has a selectable marker, such as neo or his. Once the fibroblasts have been efficiently infected, the fibroblasts are analyzed to determine whether protein is produced.

[1078] The engineered fibroblasts are then transplanted onto the host, either alone or after having been grown to confluence on cytodex 3 microcarrier beads.

### Example 17

### Gene Therapy Using Endogenous Genes Corresponding to Polynucleotides of the Invention

[1079] Another method of gene therapy according to the present invention involves operably associating the endogenous polynucleotide sequence of the invention with a promoter via homologous recombination as described, for example, in U.S. Pat. No. 5,641,670, issued Jun. 24, 1997; International Publication NO: WO 96/29411, published Sep. 26, 1996; International Publication NO: WO 94/12650, published Aug. 4, 1994; Koller et al., Proc. Natl. Acad. Sci. USA, 86:8932-8935 (1989); and Zijlstra et al., Nature, 342:435-438 (1989). This method involves the activation of a gene which is present in the target cells, but which is not expressed in the cells, or is expressed at a lower level than desired.

[1080] Polynucleotide constructs are made which contain a promoter and targeting sequences, which are homologous to the 5′ non-coding sequence of endogenous polynucleotide sequence, flanking the promoter. The targeting sequence will be sufficiently near the 5′ end of the polynucleotide sequence so the promoter will be operably linked to the endogenous sequence upon homologous recombination. The promoter and the targeting sequences can be amplified using PCR. Preferably, the amplified promoter contains distinct restriction enzyme sites on the 5′ and 3′ ends. Preferably, the 3′ end of the first targeting sequence contains the same restriction enzyme site as the 5′ end of the amplified promoter and the 5′ end of the second targeting sequence contains the same restriction site as the 3′ end of the amplified promoter.

[1081] The amplified promoter and the amplified targeting sequences are digested with the appropriate restriction enzymes and subsequently treated with calf intestinal phosphatase. The digested promoter and digested targeting sequences are added together in the presence of T4 DNA ligase. The resulting mixture is maintained under conditions appropriate for ligation of the two fragments. The construct is size fractionated on an agarose gel, then purified by phenol extraction and ethanol precipitation.

[1082] In this Example, the polynucleotide constructs are administered as naked polynucleotides via electroporation. However, the polynucleotide constructs may also be administered with transfection-facilitating agents, such as liposomes, viral sequences, viral particles, precipitating agents, etc. Such methods of delivery are known in the art.

[1083] Once the cells are transfected, homologous recombination will take place which results in the promoter being operably linked to the endogenous polynucleotide sequence. This results in the expression of polynucleotide corresponding to the polynucleotide in the cell. Expression may be detected by immunological staining, or any other method known in the art.

[1084] Fibroblasts are obtained from a subject by skin biopsy. The resulting tissue is placed in DMEM+10% fetal calf serum. Exponentially growing or early stationary phase fibroblasts are trypsinized and rinsed from the plastic surface with nutrient medium. An aliquot of the cell suspension is removed for counting, and the remaining cells are subjected to centrifugation. The supernatant is aspirated and the pellet is resuspended in 5 ml of electroporation buffer (20 mM HEPES pH 7.3, 137 mM NaCl, 5 mM KCl, 0.7 mM Na₂ HPO₄, 6 mM dextrose). The cells are recentrifuged, the supernatant aspirated, and the cells resuspended in electroporation buffer containing 1 mg/ml acetylated bovine serum albumin. The final cell suspension contains approximately 3×10⁶ cells/ml. Electroporation should be performed immediately following resuspension.

[1085] Plasmid DNA is prepared according to standard techniques. For example, to construct a plasmid for targeting to the locus corresponding to the polynucleotide of the invention, plasmid pUC18 (MBI Fermentas, Amherst, N.Y.) is digested with HindIll. The CMV promoter is amplified by PCR with an XbaI site on the 5′ end and a BamHI site on the 3′ end. Two non-coding sequences are amplified via PCR: one non-coding sequence (fragment 1) is amplified with a HindIII site at the 5′ end and an Xba site at the 3′end; the other non-coding sequence (fragment 2) is amplified with a BamHI site at the 5′end and a HindIII site at the 3′end. The CMV promoter and the fragments (1 and 2) are digested with the appropriate enzymes (CMV promoter—XbaI and BamHl; fragment 1—XbaI; fragment 2-BamHI) and ligated together. The resulting ligation product is digested with HindIII, and ligated with the HindIII-digested pUCI 8 plasmid.

[1086] Plasmid DNA is added to a sterile cuvette with a 0.4 cm electrode gap (Bio-Rad). The final DNA concentration is generally at least 120 μg/ml. 0.5 ml of the cell suspension (containing approximately 1.5.×10⁶ cells) is then added to the cuvette, and the cell suspension and DNA solutions are gently mixed. Electroporation is performed with a Gene-Pulser apparatus (Bio-Rad). Capacitance and voltage are set at 960 μF and 250-300 V, respectively. As voltage increases, cell survival decreases, but the percentage of surviving cells that stably incorporate the introduced DNA into their genome increases dramatically. Given these parameters, a pulse time of approximately 14-20 mSec should be observed.

[1087] Electroporated cells are maintained at room temperature for approximately 5 min, and the contents of the cuvette are then gently removed with a sterile transfer pipette. The cells are added directly to 10 ml of prewarmed nutrient media (DMEM with 15% calf serum) in a 10 cm dish and incubated at 37 degree C. The following day, the media is aspirated and replaced with 10 ml of fresh media and incubated for a further 16-24 hours.

[1088] The engineered fibroblasts are then injected into the host, either alone or after having been grown to confluence on cytodex 3 microcarrier beads. The fibroblasts now produce the protein product. The fibroblasts can then be introduced into a patient as described above.

### Example 18

### Method of Treatment Using Gene Therapy—in vivo

[1089] Another aspect of the present invention is using in vivo gene therapy methods to treat disorders, diseases and conditions. The gene therapy method relates to the introduction of naked nucleic acid (DNA, RNA, and antisense DNA or RNA) sequences into an animal to increase or decrease the expression of the polypeptide. The polynucleotide of the present invention may be operatively linked to (i.e., associated with) a promoter or any other genetic elements necessary for the expression of the polypeptide by the target tissue. Such gene therapy and delivery techniques and methods are known in the art, see, for example, WO90/11092, WO98/11779; U.S. Pat. Nos. 5,693,622, 5,705,151, 5,580,859; Tabata et al., Cardiovasc. Res. 35(3):470-479 (1997); Chao et al., Pharmacol. Res. 35(6):517-522 (1997); Wolff, Neuromuscul. Disord. 7(5):314-318 (1997); Schwartz et al., Gene Ther. 3(5):405-411 (1996); Tsurumi et al., Circulation 94(12):3281-3290 (1996) (incorporated herein by reference).

[1090] The polynucleotide constructs may be delivered by any method that delivers injectable materials to the cells of an animal, such as, injection into the interstitial space of tissues (heart, muscle, skin, lung, liver, intestine and the like). The polynucleotide constructs can be delivered in a pharmaceutically acceptable liquid or aqueous carrier.

[1091] The term “naked” polynucleotide, DNA or RNA, refers to sequences that are free from any delivery vehicle that acts to assist, promote, or facilitate entry into the cell, including viral sequences, viral particles, liposome formulations, lipofectin or precipitating agents and the like. However, the polynucleotides of the present invention may also be delivered in liposome formulations (such as those taught in Felgner P. L. et al. (1995) Ann. NY Acad. Sci. 772:126-139 and Abdallah B. et al. (1995) Biol. Cell 85(1):1-7) which can be prepared by methods well known to those skilled in the art.

[1092] The polynucleotide vector constructs used in the gene therapy method are preferably constructs that will not integrate into the host genome nor will they contain sequences that allow for replication. Any strong promoter known to those skilled in the art can be used for driving the expression of DNA. Unlike other gene therapy techniques, one major advantage of introducing naked nucleic acid sequences into target cells is the transitory nature of the polynucleotide synthesis in the cells. Studies have shown that non-replicating DNA sequences can be introduced into cells to provide production of the desired polypeptide for periods of up to six months.

[1093] The polynucleotide construct can be delivered to the interstitial space of tissues within an animal, including muscle, skin, brain, lung, liver, spleen, bone marrow, thymus, heart, lymph, blood, bone, cartilage, pancreas, kidney, gall bladder, stomach, intestine, testis, ovary, uterus, rectum, nervous system, eye, gland, and connective tissue. Interstitial space of the tissues comprises the intercellular fluid, mucopolysaccharide matrix among the reticular fibers of organ tissues, elastic fibers in the walls of vessels or chambers, collagen fibers of fibrous tissues, or that same matrix within connective tissue ensheathing muscle cells or in the lacunae of bone. It is similarly the space occupied by the plasma of the circulation and the lymph fluid of the lymphatic channels. Delivery to the interstitial space of muscle tissue is preferred for the reasons discussed below. They may be conveniently delivered by injection into the tissues comprising these cells. They are preferably delivered to and expressed in persistent, non-dividing cells which are differentiated, although delivery and expression may be achieved in non-differentiated or less completely differentiated cells, such as, for example, stem cells of blood or skin fibroblasts. In vivo muscle cells are particularly competent in their ability to take up and express polynucleotides.

[1094] For the naked polynucleotide injection, an effective dosage amount of DNA or RNA will be in the range of from about 0.05 g/kg body weight to about 50 mg/kg body weight. Preferably the dosage will be from about 0.005 mg/kg to about 20 mg/kg and more preferably from about 0.05 mg/kg to about 5 mg/kg. Of course, as the artisan of ordinary skill will appreciate, this dosage will vary according to the tissue site of injection. The appropriate and effective dosage of nucleic acid sequence can readily be determined by those of ordinary skill in the art and may depend on the condition being treated and the route of administration. The preferred route of administration is by the parenteral route of injection into the interstitial space of tissues. However, other parenteral routes may also be used, such as, inhalation of an aerosol formulation particularly for delivery to lungs or bronchial tissues, throat or mucous membranes of the nose. In addition, naked polynucleotide constructs can be delivered to arteries during angioplasty by the catheter used in the procedure.

[1095] The dose response effects of injected polynucleotide in muscle in vivo is determined as follows. Suitable template DNA for production of mRNA coding for polypeptide of the present invention is prepared in accordance with a standard recombinant DNA methodology. The template DNA, which may be either circular or linear, is either used as naked DNA or complexed with liposomes. The quadriceps muscles of mice are then injected with various amounts of the template DNA.

[1096] Five to six week old female and male Balb/C mice are anesthetized by intraperitoneal injection with 0.3 ml of 2.5% Avertin. A 1.5 cm incision is made on the anterior thigh, and the quadriceps muscle is directly visualized. The template DNA is injected in 0.1 ml of carrier in a 1 cc syringe through a 27 gauge needle over one minute, approximately 0.5 cm from the distal insertion site of the muscle into the knee and about 0.2 cm deep. A suture is placed over the injection site for future localization, and the skin is closed with stainless steel clips.

[1097] After an appropriate incubation time (e.g., 7 days) muscle extracts are prepared by excising the entire quadriceps. Every fifth 15 urn cross-section of the individual quadriceps muscles is histochemically stained for protein expression. A time course for protein expression may be done in a similar fashion except that quadriceps from different mice are harvested at different times. Persistence of DNA in muscle following injection may be determined by Southern blot analysis after preparing total cellular DNA and HIRT supernatants from injected and control mice. The results of the above experimentation in mice can be used to extrapolate proper dosages and other treatment parameters in humans and other animals using naked DNA.

### Example 19

### Transgenic Animals

[1098] The polypeptides of the invention can also be expressed in transgenic animals. Animals of any species, including, but not limited to, mice, rats, rabbits, hamsters, guinea pigs, pigs, micro-pigs, goats, sheep, cows and non-human primates, e.g., baboons, monkeys, and chimpanzees may be used to generate transgenic animals. In a specific embodiment, techniques described herein or otherwise known in the art, are used to express polypeptides of the invention in humans, as part of a gene therapy protocol.

[1099] Any technique known in the art may be used to introduce the transgene (i.e., polynucleotides of the invention) into animals to produce the founder lines of transgenic animals. Such techniques include, but are not limited to, pronuclear microinjection (Paterson et al., Appl. Microbiol. Biotechnol. 40:691-698 (1994); Carver et al., Biotechnology (NY) 11:1263-1270 (1993); Wright et al., Biotechnology (NY) 9:830-834 (1991); and Hoppe et al., U.S. Pat. No. 4,873,191 (1989)); retrovirus mediated gene transfer into germ lines (Van der Putten et al., Proc. Natl. Acad. Sci., USA 82:6148-6152 (1985)), blastocysts or embryos; gene targeting in embryonic stem cells (Thompson et al., Cell 56:313-321 (1989)); electroporation of cells or embryos (Lo, 1983, Mol Cell. Biol. 3:1803-1814 (1983)); introduction of the polynucleotides of the invention using a gene gun (see, e.g., Ulmer et al., Science 259:1745 (1993); introducing nucleic acid constructs into embryonic pleuripotent stem cells and transferring the stem cells back into the blastocyst; and sperm-mediated gene transfer (Lavitrano et al., Cell 57:717-723 (1989); etc. For a review of such techniques, see Gordon, “Transgenic Animals,” Intl. Rev. Cytol. 115:171-229 (1989), which is incorporated by reference herein in its entirety.

[1100] Any technique known in the art may be used to produce transgenic clones containing polynucleotides of the invention, for example, nuclear transfer into enucleated oocytes of nuclei from cultured embryonic, fetal, or adult cells induced to quiescence (Campell et al., Nature 380:64-66 (1996); Wilmut et al., Nature 385:810⁻⁸¹³ (1997)).

[1101] The present invention provides for transgenic animals that carry the transgene in all their cells, as well as animals which carry the transgene in some, but not all their cells, i.e., mosaic animals or chimeric. The transgene may be integrated as a single transgene or as multiple copies such as in concatamers, e.g., head-to-head tandems or head-to-tail tandems. The transgene may also be selectively introduced into and activated in a particular cell type by following, for example, the teaching of Lasko et al. (Lasko et al., Proc. Natl. Acad. Sci. USA 89:6232-6236 (1992)). The regulatory sequences required for such a cell-type specific activation will depend upon the particular cell type of interest, and will be apparent to those of skill in the art. When it is desired that the polynucleotide transgene be integrated into the chromosomal site of the endogenous gene, gene targeting is preferred. Briefly, when such a technique is to be utilized, vectors containing some nucleotide sequences homologous to the endogenous gene are designed for the purpose of integrating, via homologous recombination with chromosomal sequences, into and disrupting the function of the nucleotide sequence of the endogenous gene. The transgene may also be selectively introduced into a particular cell type, thus inactivating the endogenous gene in only that cell type, by following, for example, the teaching of Gu et al. (Gu et al., Science 265:103-106 (1994)). The regulatory sequences required for such a cell-type specific inactivation will depend upon the particular cell type of interest, and will be apparent to those of skill in the art.

[1102] Once transgenic animals have been generated, the expression of the recombinant gene may be assayed utilizing standard techniques. Initial screening may be accomplished by Southern blot analysis or PCR techniques to analyze animal tissues to verify that integration of the transgene has taken place. The level of mRNA expression of the transgene in the tissues of the transgenic animals may also be assessed using techniques which include, but are not limited to, Northern blot analysis of tissue samples obtained from the animal, in situ hybridization analysis, and reverse transcriptase-PCR (rt-PCR). Samples of transgenic gene-expressing tissue may also be evaluated immunocytochemically or immunohistochemically using antibodies specific for the transgene product.

[1103] Once the founder animals are produced, they may be bred, inbred, outbred, or crossbred to produce colonies of the particular animal. Examples of such breeding strategies include, but are not limited to: outbreeding of founder animals with more than one integration site in order to establish separate lines; inbreeding of separate lines in order to produce compound transgenics that express the transgene at higher levels because of the effects of additive expression of each transgene; crossing of heterozygous transgenic animals to produce animals homozygous for a given integration site in order to both augment expression and eliminate the need for screening of animals by DNA analysis; crossing of separate homozygous lines to produce compound heterozygous or homozygous lines; and breeding to place the transgene on a distinct background that is appropriate for an experimental model of interest.

[1104] Transgenic animals of the invention have uses which include, but are not limited to, animal model systems useful in elaborating the biological function of polypeptides of the present invention, studying conditions and/or disorders associated with aberrant expression, and in screening for compounds effective in ameliorating such conditions and/or disorders.

### Example 20

### Knock-out Animals

[1105] Endogenous gene expression can also be reduced by inactivating or “knocking out” the gene and/or its promoter using targeted homologous recombination. (e.g., see Smithies et al., Nature 317:230-234 (1985); Thomas & Capecchi, Cell 51:503-512 (1987); Thompson et al., Cell 5:313-321 (1989); each of which is incorporated by reference herein in its entirety). For example, a mutant, non-functional polynucleotide of the invention (or a completely unrelated DNA sequence) flanked by DNA homologous to the endogenous polynucleotide sequence (either the coding regions or regulatory regions of the gene) can be used, with or without a selectable marker and/or a negative selectable marker, to transfect cells that express polypeptides of the invention in vivo. In another embodiment, techniques known in the art are used to generate knockouts in cells that contain, but do not express the gene of interest. Insertion of the DNA construct, via targeted homologous recombination, results in inactivation of the targeted gene. Such approaches are particularly suited in research and agricultural fields where modifications to embryonic stem cells can be used to generate animal offspring with an inactive targeted gene (e.g., see Thomas & Capecchi 1987 and Thompson 1989, supra). However this approach can be routinely adapted for use in humans provided the recombinant DNA constructs are directly administered or targeted to the required site in vivo using appropriate viral vectors that will be apparent to those of skill in the art.

[1106] In further embodiments of the invention, cells that are genetically engineered to express the polypeptides of the invention, or alternatively, that are genetically engineered not to express the polypeptides of the invention (e.g., knockouts) are administered to a patient in vivo. Such cells may be obtained from the patient (i.e., animal, including human) or an MHC compatible donor and can include, but are not limited to fibroblasts, bone marrow cells, blood cells (e.g., lymphocytes), adipocytes, muscle cells, endothelial cells etc. The cells are genetically engineered in vitro using recombinant DNA techniques to introduce the coding sequence of polypeptides of the invention into the cells, or alternatively, to disrupt the coding sequence and/or endogenous regulatory sequence associated with the polypeptides of the invention, e.g., by transduction (using viral vectors, and preferably vectors that integrate the transgene into the cell genome) or transfection procedures, including, but not limited to, the use of plasmids, cosmids, YACs, naked DNA, electroporation, liposomes, etc. The coding sequence of the polypeptides of the invention can be placed under the control of a strong constitutive or inducible promoter or promoter/enhancer to achieve expression, and preferably secretion, of the polypeptides of the invention. The engineered cells which express and preferably secrete the polypeptides of the invention can be introduced into the patient systemically, e.g., in the circulation, or intraperitoneally.

[1107] Alternatively, the cells can be incorporated into a matrix and implanted in the body, e.g., genetically engineered fibroblasts can be implanted as part of a skin graft; genetically engineered endothelial cells can be implanted as part of a lymphatic or vascular graft. (See, for example, Anderson et al. U.S. Pat. No. 5,399,349; and Mulligan & Wilson, U.S. Pat. No. 5,460,959 each of which is incorporated by reference herein in its entirety).

[1108] When the cells to be administered are non-autologous or non-MHC compatible cells, they can be administered using well known techniques which prevent the development of a host immune response against the introduced cells. For example, the cells may be introduced in an encapsulated form which, while allowing for an exchange of components with the immediate extracellular environment, does not allow the introduced cells to be recognized by the host immune system.

[1109] Transgenic and “knock-out” animals of the invention have uses which include, but are not limited to, animal model systems useful in elaborating the biological function of polypeptides of the present invention, studying conditions and/or disorders associated with aberrant expression, and in screening for compounds effective in ameliorating such conditions and/or disorders.

### Example 21

### Assays Detecting Stimulation or Inhibition of B cell Proliferation and Differentiation

[1110] Generation of functional humoral immune responses requires both soluble and cognate signaling between B-lineage cells and their microenvironment. Signals may impart a positive stimulus that allows a B-lineage cell to continue its programmed development, or a negative stimulus that instructs the cell to arrest its current developmental pathway. To date, numerous stimulatory and inhibitory signals have been found to influence B cell responsiveness including IL-2, IL-4, IL-5, IL-6, IL-7, IL10, IL-13, IL-14 and IL-15. Interestingly, these signals are by themselves weak effectors but can, in combination with various co-stimulatory proteins, induce activation, proliferation, differentiation, homing, tolerance and death among B cell populations.

[1111] One of the best studied classes of B-cell co-stimulatory proteins is the TNF-superfamily. Within this family CD40, CD27, and CD30 along with their respective ligands CD154, CD70, and CD153 have been found to regulate a variety of immune responses. Assays which allow for the detection and/or observation of the proliferation and differentiation of these B-cell populations and their precursors are valuable tools in determining the effects various proteins may have on these B-cell populations in terms of proliferation and differentiation. Listed below are two assays designed to allow for the detection of the differentiation, proliferation, or inhibition of B-cell populations and their precursors.

[1112] In Vitro Assay—Agonists or antagonists of the invention can be assessed for its ability to induce activation, proliferation, differentiation or inhibition and/or death in B-cell populations and their precursors. The activity of the agonists or antagonists of the invention on purified human tonsillar B cells, measured qualitatively over the dose range from 0.1 to 10,000 ng/mL, is assessed in a standard B-lymphocyte co-stimulation assay in which purified tonsillar B cells are cultured in the presence of either formalin-fixed Staphylococcus aureus Cowan I (SAC) or immobilized anti-human IgM antibody as the priming agent. Second signals such as IL-2 and IL-15 synergize with SAC and IgM crosslinking to elicit B cell proliferation as measured by tritiated-thymidine incorporation. Novel synergizing agents can be readily identified using this assay. The assay involves isolating human tonsillar B cells by magnetic bead (MACS) depletion of CD3-positive cells. The resulting cell population is greater than 95% B cells as assessed by expression of CD45R(B220).

[1113] Various dilutions of each sample are placed into individual wells of a 96-well plate to which are added 10⁵ B-cells suspended in culture medium (RPMI 1640 containing 10% FBS, 5×10⁻⁵M 2ME, 100 U/ml penicillin, lOug/ml streptomycin, and 10⁻⁵ dilution of SAC) in a total volume of 150 ul. Proliferation or inhibition is quantitated by a 20 h pulse (luCi/well) with 3H-thymidine (6.7 Ci/mM) beginning 72 h post factor addition. The positive and negative controls are IL2 and medium respectively.

[1114] In vivo Assay—BALB/c mice are injected (i.p.) twice per day with buffer only, or 2 mg/Kg of agonists or antagonists of the invention, or truncated forms thereof. Mice receive this treatment for 4 consecutive days, at which time they are sacrificed and various tissues and serum collected for analyses. Comparison of H&E sections from normal spleens and spleens treated with agonists or antagonists of the invention identify the results of the activity of the agonists or antagonists on spleen cells, such as the diffusion of peri-arterial lymphatic sheaths, and/or significant increases in the nucleated cellularity of the red pulp regions, which may indicate the activation of the differentiation and proliferation of B-cell populations. Immunohistochemical studies using a B cell marker, anti-CD45R(B220), are used to determine whether any physiological changes to splenic cells, such as splenic disorganization, are due to increased B-cell representation within loosely defined B-cell zones that infiltrate established T-cell regions.

[1115] Flow cytometric analyses of the spleens from mice treated with agonist or antagonist is used to indicate whether the agonists or antagonists specifically increases the proportion of ThB+, CD45R(B220)dull B cells over that which is observed in control mice.

[1116] Likewise, a predicted consequence of increased mature B-cell representation in vivo is a relative increase in serum Ig titers. Accordingly, serum IgM and IgA levels are compared between buffer and agonists or antagonists-treated mice.

[1117] The studies described in this example tested activity of agonists or antagonists of the invention. However, one skilled in the art could easily modify the exemplified studies to test the activity of polynucleotides or polypeptides of the invention (e.g., gene therapy).

### Example 22

### T Cell Proliferation Assay

[1118] A CD3-induced proliferation assay is performed on PBMCs and is measured by the uptake of ³H-thymidine. The assay is performed as follows. Ninety-six well plates are coated with 100 μl/well of mAb to CD3 (HIT3a, Pharmingen) or isotype-matched control mAb (B33. 1) overnight at 4 degrees C. (1 μg/ml in .05M bicarbonate buffer, pH 9.5), then washed three times with PBS. PBMC are isolated by F/H gradient centrifugation from human peripheral blood and added to quadruplicate wells (5×10⁴/well) of mAb coated plates in RPMI containing 10% FCS and P/S in the presence of varying concentrations of agonists or antagonists of the invention (total volume 200 ul). Relevant protein buffer and medium alone are controls. After 48 hr. culture at 37 degrees C., plates are spun for 2 min. at 1000 rpm and 100 μl of supernatant is removed and stored −20 degrees C. for measurement of IL-2 (or other cytokines) if effect on proliferation is observed. Wells are supplemented with 100 ul of medium containing 0.5 uCi of ³H-thymidine and cultured at 37 degrees C. for 18-24 hr. Wells are harvested and incorporation of ³H-thymidine used as a measure of proliferation. Anti-CD3 alone is the positive control for proliferation. IL-2 (100 U/ml) is also used as a control which enhances proliferation. Control antibody which does not induce proliferation of T cells is used as the negative control for the effects of agonists or antagonists of the invention.

[1119] The studies described in this example tested activity of agonists or antagonists of the invention. However, one skilled in the art could easily modify the exemplified studies to test the activity of polynucleotides or polypeptides of the invention (e.g., gene therapy).

### Example 23

### Effect of Agonists or Antagonists of the Invention on the Expression of MHC Class II, Costimulatory and Adhesion Molecules and Cell Differentiation ofMonocytes and Monocyte-derived Human Dendritic Cells

[1120] Dendritic cells are generated by the expansion of proliferating precursors found in the peripheral blood: adherent PBMC or elutriated monocytic fractions are cultured for 7-10 days with GM-CSF (50 ng/ml) and IL-4 (20 ng/ml). These dendritic cells have the characteristic phenotype of immature cells (expression of CD1, CD80, CD86, CD40 and MHC class II antigens). Treatment with activating factors, such as TNF-α, causes a rapid change in surface phenotype (increased expression of MHC class I and II, costimulatory and adhesion molecules, downregulation of FCYRII, upregulation of CD83). These changes correlate with increased antigen-presenting capacity and with functional maturation of the dendritic cells.

[1121] FACS analysis of surface antigens is performed as follows. Cells are treated 1-3 days with increasing concentrations of agonist or antagonist of the invention or LPS (positive control), washed with PBS containing 1% BSA and 0.02 mM sodium azide, and then incubated with 1:20 dilution of appropriate FITC- or PE-labeled monoclonal antibodies for 30 minutes at 4 degrees C. After an additional wash, the labeled cells are analyzed by flow cytometry on a FACScan (Becton Dickinson).

[1122] Effect on the Production of Cytokines.

[1123] Cytokines generated by dendritic cells, in particular IL-12, are important in the initiation of T-cell dependent immune responses. IL-12 strongly influences the development of Thl helper T-cell immune response, and induces cytotoxic T and NK cell function. An ELISA is used to measure the IL-12 release as follows. Dendritic cells (10⁶/ml) are treated with increasing concentrations of agonists or antagonists of the invention for 24 hours. LPS (100 ng/ml) is added to the cell culture as positive control. Supernatants from the cell cultures are then collected and analyzed for IL-12 content using commercial ELISA kit (e.g., R & D Systems (Minneapolis, Minn.)). The standard protocols provided with the kits are used.

[1124] Effect on the Expression of MHC Class II Costimulatory And Adhesion Molecules.

[1125] Three major families of cell surface antigens can be identified on monocytes: adhesion molecules, molecules involved in antigen presentation, and Fc receptor. Modulation of the expression of MHC class II antigens and other costimulatory molecules, such as B7 and ICAM-1, may result in changes in the antigen presenting capacity of monocytes and ability to induce T cell activation. Increased expression of Fc receptors may correlate with improved monocyte cytotoxic activity, cytokine release and phagocytosis.

[1126] FACS analysis is used to examine the surface antigens as follows. Monocytes are treated 1-5 days with increasing concentrations of agonists or antagonists of the invention or LPS (positive control), washed with PBS containing 1% BSA and 0.02 mM sodium azide, and then incubated with 1:20 dilution of appropriate FITC- or PE-labeled monoclonal antibodies for 30 minutes at 4 degrees C. After an additional wash, the labeled cells are analyzed by flow cytometry on a FACScan (Becton Dickinson).

[1127] Monocvte Activation and/or Increased Survival.

[1128] Assays for molecules that activate (or alternatively, inactivate) monocytes and/or increase monocyte survival (or alternatively, decrease monocyte survival) are known in the art and may routinely be applied to determine whether a molecule of the invention functions as an inhibitor or activator of monocytes. Agonists or antagonists of the invention can be screened using the three assays described below. For each of these assays, Peripheral blood mononuclear cells (PBMC) are purified from single donor leukopacks (American Red Cross, Baltimore, Md.) by centrifugation through a Histopaque gradient (Sigma). Monocytes are isolated from PBMC by counterflow centrifugal elutriation.

[1129] Monocyte Survival Assay.

[1130] Human peripheral blood monocytes progressively lose viability when cultured in absence of serum or other stimuli. Their death results from internally regulated processes (apoptosis). Addition to the culture of activating factors, such as TNF-alpha dramatically improves cell survival and prevents DNA fragmentation. Propidium iodide (PI) staining is used to measure apoptosis as follows. Monocytes are cultured for 48 hours in polypropylene tubes in serum-free medium (positive control), in the presence of 100 ng/ml TNF-alpha (negative control), and in the presence of varying concentrations of the compound to be tested. Cells are suspended at a concentration of 2×10⁶/ml in PBS containing PI at a final concentration of 5 μg/ml, and then incubated at room temperature for 5 minutes before FACScan analysis. PI uptake has been demonstrated to correlate with DNA fragmentation in this experimental paradigm.

[1131] Effect on Cytokine Release.

[1132] An important function of monocytes/macrophages is their regulatory activity on other cellular populations of the immune system through the release of cytokines after stimulation. An ELISA to measure cytokine release is performed as follows. Human monocytes are incubated at a density of 5×10⁵ cells/ml with increasing concentrations of agonists or antagonists of the invention and under the same conditions, but in the absence of agonists or antagonists. For IL-12 production, the cells are primed overnight with IFN (100 U/ml) in the presence of agonist or antagonist of the invention. LPS (10 ng/ml) is then added. Conditioned media are collected after 24 h and kept frozen until use. Measurement of TNF-alpha, IL-10, MCP-1 and IL-8 is then performed using a commercially available ELISA kit (e.g., R & D Systems (Minneapolis, Minn.)) and applying the standard protocols provided with the kit.

[1133] Oxidative Burst.

[1134] Purified monocytes are plated in 96-w plate at 2-1×10⁵ cell/well. Increasing concentrations of agonists or antagonists of the invention are added to the wells in a total volume of 0.2 ml culture medium (RPMI 1640+10% FCS, glutamine and antibiotics). After 3 days incubation, the plates are centrifuged and the medium is removed from the wells. To the macrophage monolayers, 0.2 ml per well of phenol red solution (140 mM NaCl, 10 mM potassium phosphate buffer pH 7.0, 5.5 mM dextrose, 0.56 mM phenol red and 19 U/ml of HRPO) is added, together with the stimulant (200 nM PMA). The plates are incubated at 37° C. for 2 hours and the reaction is stopped by adding 20 μl 1N NaOH per well. The absorbance is read at 610 nm. To calculate the amount of H202 produced by the macrophages, a standard curve of a H₂O₂ solution of known molarity is performed for each experiment.

[1135] The studies described in this example tested activity of agonists or antagonists of the invention. However, one skilled in the art could easily modify the exemplified studies to test the activity of polynucleotides or polypeptides of the invention (e.g., gene therapy).

### Example 24

### Biological Effects of Agonists or Antagonists of the Invention Astrocyte and Neuronal Assays

[1136] Agonists or antagonists of the invention, expressed in Escherichia coli and purified as described above, can be tested for activity in promoting the survival, neurite outgrowth, or phenotypic differentiation of cortical neuronal cells and for inducing the proliferation of glial fibrillary acidic protein immunopositive cells, astrocytes. The selection of cortical cells for the bioassay is based on the prevalent expression of FGF-1 and FGF-2 in cortical structures and on the previously reported enhancement of cortical neuronal survival resulting from FGF-2 treatment. A thymidine incorporation assay, for example, can be used to elucidate an agonist or antagonist of the invention's activity on these cells.

[1137] Moreover, previous reports describing the biological effects of FGF-2 (basic FGF) on cortical or hippocampal neurons in vitro have demonstrated increases in both neuron survival and neurite outgrowth (Walicke et al., “Fibroblast growth factor promotes survival of dissociated hippocampal neurons and enhances neurite extension.” Proc. Natl. Acad. Sci. USA 83:3012-3016. (1986), assay herein incorporated by reference in its entirety). However, reports from experiments done on PC-12 cells suggest that these two responses are not necessarily synonymous and may depend on not only which FGF is being tested but also on which receptor(s) are expressed on the target cells. Using the primary cortical neuronal culture paradigm, the ability of an agonist or antagonist of the invention to induce neurite outgrowth can be compared to the response achieved with FGF-2 using, for example, a thymidine incorporation assay.

[1138] Fibroblast and Endothelial Cell Assays

[1139] Human lung fibroblasts are obtained from Clonetics (San Diego, Calif.) and maintained in growth media from Clonetics. Dermal microvascular endothelial cells are obtained from Cell Applications (San Diego, Calif.). For proliferation assays, the human lung fibroblasts and dermal microvascular endothelial cells can be cultured at 5,000 cells/well in a 96-well plate for one day in growth medium. The cells are then incubated for one day in 0.1% BSA basal medium. After replacing the medium with fresh 0.1% BSA medium, the cells are incubated with the test proteins for 3 days. Alamar Blue (Alamar Biosciences, Sacramento, Calif.) is added to each well to a final concentration of 10%. The cells are incubated for 4 hr. Cell viability is measured by reading in a CytoFluor fluorescence reader. For the PGE₂ assays, the human lung fibroblasts are cultured at 5,000 cells/well in a 96-well plate for one day. After a medium change to 0.1% BSA basal medium, the cells are incubated with FGF-2 or agonists or antagonists of the invention with or without IL-1α for 24 hours. The supernatants are collected and assayed for PGE₂ by EIA kit (Cayman, Ann Arbor, Mich.). For the IL-6 assays, the human lung fibroblasts are cultured at 5,000 cells/well in a 96-well plate for one day. After a medium change to 0.1% BSA basal medium, the cells are incubated with FGF-2 or with or without agonists or antagonists of the invention IL-1α for 24 hours. The supernatants are collected and assayed for IL-6 by ELISA kit (Endogen, Cambridge, Mass.).

[1140] Human lung fibroblasts are cultured with FGF-2 or agonists or antagonists of the invention for 3 days in basal medium before the addition of Alamar Blue to assess effects on growth of the fibroblasts. FGF-2 should show a stimulation at 10-2500 ng/ml which can be used to compare stimulation with agonists or antagonists of the invention.

[1141] Parkinson Models.

[1142] The loss of motor function in Parkinson's disease is attributed to a deficiency of striatal dopamine resulting from the degeneration of the nigrostriatal dopaminergic projection neurons. An animal model for Parkinson's that has been extensively characterized involves the systemic administration of l-methyl-4 phenyl 1,2,3,6-tetrahydropyridine (MPTP). In the CNS, MPTP is taken-up by astrocytes and catabolized by monoamine oxidase B to 1-methyl-4-phenyl pyridine (MPP⁺) and released. Subsequently, MPP⁺ is actively accumulated in dopaminergic neurons by the high-affinity reuptake transporter for dopamine. MPP⁺ is then concentrated in mitochondria by the electrochemical gradient and selectively inhibits nicotidamide adenine disphosphate: ubiquinone oxidoreductionase (complex I), thereby interfering with electron transport and eventually generating oxygen radicals.

[1143] It has been demonstrated in tissue culture paradigms that FGF-2 (basic FGF) has trophic activity towards nigral dopaminergic neurons (Ferrari et al., Dev. Biol. 1989). Recently, Dr. Unsicker's group has demonstrated that administering FGF-2 in gel foam implants in the striatum results in the near complete protection of nigral dopaminergic neurons from the toxicity associated with MPTP exposure (Otto and Unsicker, J. Neuroscience, 1990).

[1144] Based on the data with FGF-2, agonists or antagonists of the invention can be evaluated to determine whether it has an action similar to that of FGF-2 in enhancing dopaminergic neuronal survival in vitro and it can also be tested in vivo for protection of dopaminergic neurons in the striatum from the damage associated with MPTP treatment. The potential effect of an agonist or antagonist of the invention is first examined in vitro in a dopaminergic neuronal cell culture paradigm. The cultures are prepared by dissecting the midbrain floor plate from gestation day 14 Wistar rat embryos. The tissue is dissociated with trypsin and seeded at a density of 200,000 cells/cm² on polyorthinine-laminin coated glass coverslips. The cells are maintained in Dulbecco's Modified Eagle's medium and F12 medium containing hormonal supplements (N1). The cultures are fixed with paraformaldehyde after 8 days in vitro and are processed for tyrosine hydroxylase, a specific marker for dopaminergic neurons, immunohistochemical staining. Dissociated cell cultures are prepared from embryonic rats. The culture medium is changed every third day and the factors are also added at that time.

[1145] Since the dopaminergic neurons are isolated from animals at gestation day 14, a developmental time which is past the stage when the dopaminergic precursor cells are proliferating, an increase in the number of tyrosine hydroxylase immunopositive neurons would represent an increase in the number of dopaminergic neurons surviving in vitro. Therefore, if an agonist or antagonist of the invention acts to prolong the survival of dopaminergic neurons, it would suggest that the agonist or antagonist may be involved in Parkinson's Disease.

[1146] The studies described in this example tested activity of agonists or antagonists of the invention. However, one skilled in the art could easily modify the exemplified studies to test the activity of polynucleotides or polypeptides of the invention (e.g., gene therapy).

### Example 25

### The Effect of Agonists or Antagonists of the Invention on the Growth of Vascular Endothelial Cells

[1147] On day 1, human umbilical vein endothelial cells (HUVEC) are seeded at 2-5×10⁴ cells/35 mm dish density in M199 medium containing 4% fetal bovine serum (FBS), 16 units/ml heparin, and 50 units/ml endothelial cell growth supplements (ECGS, Biotechnique, Inc.). On day 2, the medium is replaced with M199 containing 10% FBS, 8 units/ml heparin. An agonist or antagonist of the invention, and positive controls, such as VEGF and basic FGF (bFGF) are added, at varying concentrations. On days 4 and 6, the medium is replaced. On day 8, cell number is determined with a Coulter Counter.

[1148] An increase in the number of HUVEC cells indicates that the compound of the invention may proliferate vascular endothelial cells, while a decrease in the number of HUVEC cells indicates that the compound of the invention inhibits vascular endothelial cells.

[1149] The studies described in this example tested activity of a polypeptide of the invention. However, one skilled in the art could easily modify the exemplified studies to test the activity of polynucleotides (e.g., gene therapy), agonists, and/or antagonists of the invention.

### Example 26

### Rat Corneal Wound Healing Model

[1150] This animal model shows the effect of an agonist or antagonist of the invention on neovascularization. The experimental protocol includes:

[1151] Making a 1-1.5 mm long incision from the center of cornea into the stromal layer.

[1152] Inserting a spatula below the lip of the incision facing the outer corner of the eye.

[1153] Making a pocket (its base is 1-1.5 mm form the edge of the eye).

[1154] Positioning a pellet, containing 50 ng-5 ug of an agonist or antagonist of the invention, within the pocket.

[1155] Treatment with an agonist or antagonist of the invention can also be applied topically to the corneal wounds in a dosage range of 20 mg-500 mg (daily treatment for five days).

[1156] The studies described in this example tested activity of agonists or antagonists of the invention. However, one skilled in the art could easily modify the exemplified studies to test the activity of polynucleotides or polypeptides of the invention (e.g., gene therapy).

### Example 27

### Diabetic Mouse and Glucocorticoid-impaired Wound Healing Models

[1157] Diabetic db+/db+ Mouse Model.

[1158] To demonstrate that an agonist or antagonist of the invention accelerates the healing process, the genetically diabetic mouse model of wound healing is used. The full thickness wound healing model in the db+/db+ mouse is a well characterized, clinically relevant and reproducible model of impaired wound healing. Healing of the diabetic wound is dependent on formation of granulation tissue and re-epithelialization rather than contraction (Gartner, M. H. et al., J. Surg. Res. 52:389 (1992); Greenhaigh, D. G. et al., Am. J. Pathol. 136:1235 (1990)).

[1159] The diabetic animals have many of the characteristic features observed in Type II diabetes mellitus. Homozygous (db+/db+) mice are obese in comparison to their normal heterozygous (db+/+m) littermates. Mutant diabetic (db+/db+) mice have a single autosomal recessive mutation on chromosome 4 (db+) (Coleman et al. Proc. Natl. Acad. Sci. USA 77:283-293 (1982)). Animals show polyphagia, polydipsia and polyuria. Mutant diabetic mice (db+/db+) have elevated blood glucose, increased or normal insulin levels, and suppressed cell-mediated immunity (Mandel et al., J. Immunol. 120:1375 (1978); Debray-Sachs, M. et al., Clin. Exp. Immunol. 51(1):1-7 (1983); Leiter et al., Am. J. of Pathol. 114:46-55 (1985)). Peripheral neuropathy, myocardial complications, and microvascular lesions, basement membrane thickening and glomerular filtration abnormalities have been described in these animals (Norido, F. et al., Exp. Neurol. 83(2):221-232 (1984); Robertson et al., Diabetes 29(1):60-67 (1980); Giacomelli et al., Lab Invest. 40(4):460-473 (1979); Coleman, D. L., Diabetes 31 (Suppl):1-6 (1982)). These homozygous diabetic mice develop hyperglycemia that is resistant to insulin analogous to human type II diabetes (Mandel et al., J. ImmunoL 120:1375-1377 (1978)).

[1160] The characteristics observed in these animals suggests that healing in this model may be similar to the healing observed in human diabetes (Greenhalgh, et al., Am. J. of Pathol. 136:1235-1246 (1990)).

[1161] Genetically diabetic female C57BL/KsJ (db+/db+) mice and their non-diabetic (db+/+m) heterozygous littermates are used in this study (Jackson Laboratories). The animals are purchased at 6 weeks of age and are 8 weeks old at the beginning of the study. Animals are individually housed and received food and water ad libitum. All manipulations are performed using aseptic techniques. The experiments are conducted according to the rules and guidelines of Human Genome Sciences, Inc. Institutional Animal Care and Use Committee and the Guidelines for the Care and Use of Laboratory Animals.

[1162] Wounding protocol is performed according to previously reported methods (Tsuboi, R. and Rifkin, D. B., J. Exp. Med. 172:245-251 (1990)). Briefly, on the day of wounding, animals are anesthetized with an intraperitoneal injection of Avertin (0.01 mg/mL), 2,2,2-tribromoethanol and 2-methyl-2-butanol dissolved in deionized water. The dorsal region of the animal is shaved and the skin washed with 70% ethanol solution and iodine. The surgical area is dried with sterile gauze prior to wounding. An 8 mm full-thickness wound is then created using a Keyes tissue punch. Immediately following wounding, the surrounding skin is gently stretched to eliminate wound expansion. The wounds are left open for the duration of the experiment. Application of the treatment is given topically for 5 consecutive days commencing on the day of wounding. Prior to treatment, wounds are gently cleansed with sterile saline and gauze sponges.

[1163] Wounds are visually examined and photographed at a fixed distance at the day of surgery and at two day intervals thereafter. Wound closure is determined by daily measurement on days 1-5 and on day 8. Wounds are measured horizontally and vertically using a calibrated Jameson caliper. Wounds are considered healed if granulation tissue is no longer visible and the wound is covered by a continuous epithelium.

[1164] An agonist or antagonist of the invention is administered using at a range different doses, from 4 mg to 500 mg per wound per day for 8 days in vehicle. Vehicle control groups received 50 mL of vehicle solution.

[1165] Animals are euthanized on day 8 with an intraperitoneal injection of sodium pentobarbital (300 mg/kg). The wounds and surrounding skin are then harvested for histology and immunohistochemistry. Tissue specimens are placed in 10% neutral buffered formalin in tissue cassettes between biopsy sponges for further processing.

[1166] Three groups of 10 animals each (5 diabetic and 5 non-diabetic controls) are evaluated: 1) Vehicle placebo control, 2) untreated group, and 3) treated group.

[1167] Wound closure is analyzed by measuring the area in the vertical and horizontal axis and obtaining the total square area of the wound. Contraction is then estimated by establishing the differences between the initial wound area (day 0) and that of post treatment (day 8). The wound area on day 1 is 64 mm², the corresponding size of the dermal punch. Calculations are made using the following formula:

[Open area on day 8]−[Open area on day 1]/[Open area on day 1]

[1168] Specimens are fixed in 10% buffered formalin and paraffin embedded blocks are sectioned perpendicular to the wound surface (5 mm) and cut using a Reichert-Jung microtome. Routine hematoxylin-eosin (H&E) staining is performed on cross-sections of bisected wounds. Histologic examination of the wounds are used to assess whether the healing process and the morphologic appearance of the repaired skin is altered by treatment with an agonist or antagonist of the invention. This assessment included verification of the presence of cell accumulation, inflammatory cells, capillaries, fibroblasts, re-epithelialization and epidermal maturity (Greenhalgh, D. G. et al., Am. J. Pathol. 136:1235 (1990)). A calibrated lens micrometer is used by a blinded observer.

[1169] Tissue sections are also stained immunohistochemically with a polyclonal rabbit anti-human keratin antibody using ABC Elite detection system. Human skin is used as a positive tissue control while non-immune IgG is used as a negative control. Keratinocyte growth is determined by evaluating the extent of reepithelialization of the wound using a calibrated lens micrometer.

[1170] Proliferating cell nuclear antigen/cyclin (PCNA) in skin specimens is demonstrated by using anti-PCNA antibody (1:50) with an ABC Elite detection system. Human colon cancer served as a positive tissue control and human brain tissue is used as a negative tissue control. Each specimen included a section with omission of the primary antibody and substitution with non-immune mouse IgG. Ranking of these sections is based on the extent of proliferation on a scale of 0-8, the lower side of the scale reflecting slight proliferation to the higher side reflecting intense proliferation.

[1171] Experimental data are analyzed using an unpaired t test. A p value of <0.05 is considered significant.

[1172] Steroid Impaired Rat Model

[1173] The inhibition of wound healing by steroids has been well documented in various in vitro and in vivo systems (Wahl, Glucocorticoids and Wound healing. In: Anti-Inflammatory Steroid Action: Basic and Clinical Aspects. 280-302 (1989); Wahlet al., J. Immunol. 115: 476-481 (1975); Werb et al., J. Exp. Med. 147:1684-1694 (1978)). Glucocorticoids retard wound healing by inhibiting angiogenesis, decreasing vascular permeability (Ebert et al., An. Intern. Med. 37:701-705 (1952)), fibroblast proliferation, and collagen synthesis (Beck et al., Growth Factors. 5. 295-304 (1991); Haynes et al., J. Clin. Invest. 61: 703-797 (1978)) and producing a transient reduction of circulating monocytes (Haynes et al., J. Clin. Invest. 61: 703-797 (1978); Wahl, “Glucocorticoids and wound healing”, In: Antiinflammatory Steroid Action: Basic and Clinical Aspects, Academic Press, New York, pp. 280-302 (1989)). The systemic administration of steroids to impaired wound healing is a well establish phenomenon in rats (Beck et al., Growth Factors. 5: 295-304 (1991); Haynes et al., J. Clin. Invest. 61: 703-797 (1978); Wahl, “Glucocorticoids and wound healing”, In: Antiinflammatory Steroid Action: Basic and Clinical Aspects, Academic Press, New York, pp. 280-302 (1989); Pierce et al., Proc. Natl. Acad. Sci. USA 86: 2229-2233 (1989)).

[1174] To demonstrate that an agonist or antagonist of the invention can accelerate the healing process, the effects of multiple topical applications of the agonist or antagonist on full thickness excisional skin wounds in rats in which healing has been impaired by the systemic administration of methylprednisolone is assessed.

[1175] Young adult male Sprague Dawley rats weighing 250-300 g (Charles River Laboratories) are used in this example. The animals are purchased at 8 weeks of age and are 9 weeks old at the beginning of the study. The healing response of rats is impaired by the systemic administration of methylprednisolone (17 mg/kg/rat intramuscularly) at the time of wounding. Animals are individually housed and received food and water ad libitum. All manipulations are performed using aseptic techniques. This study is conducted according to the rules and guidelines of Human Genome Sciences, Inc. Institutional Animal Care and Use Committee and the Guidelines for the Care and Use of Laboratory Animals.

[1176] The wounding protocol is followed according to section A, above. On the day of wounding, animals are anesthetized with an intramuscular injection of ketamine (50 mg/kg) and xylazine (5 mg/kg). The dorsal region of the animal is shaved and the skin washed with 70% ethanol and iodine solutions. The surgical area is dried with sterile gauze prior to wounding. An 8 mm full-thickness wound is created using a Keyes tissue punch. The wounds are left open for the duration of the experiment. Applications of the testing materials are given topically once a day for 7 consecutive days commencing on the day of wounding and subsequent to methylprednisolone administration. Prior to treatment, wounds are gently cleansed with sterile saline and gauze sponges.

[1177] Wounds are visually examined and photographed at a fixed distance at the day of wounding and at the end of treatment. Wound closure is determined by daily measurement on days 1-5 and on day 8. Wounds are measured horizontally and vertically using a calibrated Jameson caliper. Wounds are considered healed if granulation tissue is no longer visible and the wound is covered by a continuous epithelium.

[1178] The agonist or antagonist of the invention is administered using at a range different doses, from 4 mg to 500 mg per wound per day for 8 days in vehicle. Vehicle control groups received 50 mL of vehicle solution.

[1179] Animals are euthanized on day 8 with an intraperitoneal injection of sodium pentobarbital (300 mg/kg). The wounds and surrounding skin are then harvested for histology. Tissue specimens are placed in 10% neutral buffered formalin in tissue cassettes between biopsy sponges for further processing.

[1180] Three groups of 10 animals each (5 with methylprednisolone and 5 without glucocorticoid) are evaluated: 1) Untreated group 2) Vehicle placebo control 3) treated groups.

[1181] Wound closure is analyzed by measuring the area in the vertical and horizontal axis and obtaining the total area of the wound. Closure is then estimated by establishing the differences between the initial wound area (day 0) and that of post treatment (day 8). The wound area on day 1 is 64 mm², the corresponding size of the dermal punch. Calculations are made using the following formula:

[Open area on day 8]−[Open area on day 1]/[Open area on day 1]

[1182] Specimens are fixed in 10% buffered formalin and paraffin embedded blocks are sectioned perpendicular to the wound surface (5 mm) and cut using an Olympus microtome. Routine hematoxylin-eosin (H&E) staining is performed on cross-sections of bisected wounds. Histologic examination of the wounds allows assessment of whether the healing process and the morphologic appearance of the repaired skin is improved by treatment with an agonist or antagonist of the invention. A calibrated lens micrometer is used by a blinded observer to determine the distance of the wound gap.

[1183] Experimental data are analyzed using an unpaired t test. A p value of <0.05 is considered significant.

[1184] The studies described in this example tested activity of agonists or antagonists of the invention. However, one skilled in the art could easily modify the exemplified studies to test the activity of polynucleotides or polypeptides of the invention (e.g., gene therapy).

### Example 28

### Lymphadema Animal Model

[1185] The purpose of this experimental approach is to create an appropriate and consistent lymphedema model for testing the therapeutic effects of an agonist or antagonist of the invention in lymphangiogenesis and re-establishment of the lymphatic circulatory system in the rat hind limb. Effectiveness is measured by swelling volume of the affected limb, quantification of the amount of lymphatic vasculature, total blood plasma protein, and histopathology. Acute lymphedema is observed for 7-10 days. Perhaps more importantly, the chronic progress of the edema is followed for up to 3-4 weeks.

[1186] Prior to beginning surgery, blood sample is drawn for protein concentration analysis. Male rats weighing approximately 350g are dosed with Pentobarbital. Subsequently, the right legs are shaved from knee to hip. The shaved area is swabbed with gauze soaked in 70% EtOH. Blood is drawn for serum total protein testing. Circumference and volumetric measurements are made prior to injecting dye into paws after marking 2 measurement levels (0.5 cm above heel, at mid-pt of dorsal paw). The intradermal dorsum of both right and left paws are injected with 0.05 ml of 1% Evan's Blue. Circumference and volumetric measurements are then made following injection of dye into paws.

[1187] Using the knee joint as a landmark, a mid-leg inguinal incision is made circumferentially allowing the femoral vessels to be located. Forceps and hemostats are used to dissect and separate the skin flaps. After locating the femoral vessels, the lymphatic vessel that runs along side and underneath the vessel(s) is located. The main lymphatic vessels in this area are then electrically coagulated or suture ligated.

[1188] Using a microscope, muscles in back of the leg (near the semitendinosis and adductors) are bluntly dissected. The popliteal lymph node is then located. The 2 proximal and 2 distal lymphatic vessels and distal blood supply of the popliteal node are then ligated by suturing. The popliteal lymph node, and any accompanying adipose tissue, is then removed by cutting connective tissues.

[1189] Care is taken to control any mild bleeding resulting from this procedure. After lymphatics are occluded, the skin flaps are sealed by using liquid skin (Vetbond) (AJ Buck). The separated skin edges are sealed to the underlying muscle tissue while leaving a gap of 0.5 cm around the leg. Skin also may be anchored by suturing to underlying muscle when necessary.

[1190] To avoid infection, animals are housed individually with mesh (no bedding). Recovering animals are checked daily through the optimal edematous peak, which typically occurred by day 5-7. The plateau edematous peak are then observed. To evaluate the intensity of the lymphedema, the circumference and volumes of 2 designated places on each paw before operation and daily for 7 days are measured. The effect of plasma proteins on lymphedema is determined and whether protein analysis is a useful testing perimeter is also investigated. The weights of both control and edematous limbs are evaluated at 2 places. Analysis is performed in a blind manner.

[1191] Circumference Measurements: Under brief gas anesthetic to prevent limb movement, a cloth tape is used to measure limb circumference. Measurements are done at the ankle bone and dorsal paw by 2 different people and those 2 readings are averaged. Readings are taken from both control and edematous limbs.

[1192] Volumetric Measurements: On the day of surgery, animals are anesthetized with Pentobarbital and are tested prior to surgery. For daily volumetrics animals are under brief halothane anesthetic (rapid immobilization and quick recovery), and both legs are shaved and equally marked using waterproof marker on legs. Legs are first dipped in water, then dipped into instrument to each marked level then measured by Buxco edema software (Chen/ictor). Data is recorded by one person, while the other is dipping the limb to marked area.

[1193] Blood-plasma protein measurements: Blood is drawn, spun, and serum separated prior to surgery and then at conclusion for total protein and Ca2⁺ comparison.

[1194] Limb Weight Comparison: After drawing blood, the animal is prepared for tissue collection. The limbs are amputated using a quillitine, then both experimental and control legs are cut at the ligature and weighed. A second weighing is done as the tibio-cacaneal joint is disarticulated and the foot is weighed.

[1195] Histological Preparations: The transverse muscle located behind the knee (popliteal) area is dissected and arranged in a metal mold, filled with freezeGel, dipped into cold methylbutane, placed into labeled sample bags at −80EC until sectioning. Upon sectioning, the muscle is observed under fluorescent microscopy for lymphatics.

[1196] The studies described in this example tested activity of agonists or antagonists of the invention. However, one skilled in the art could easily modify the exemplified studies to test the activity of polynucleotides or polypeptides of the invention (e.g., gene therapy).

### Example 29

### Suppression of TNF Alpha-induced Adhesion Molecule Expression by an Agonist or Antagonist of the Invention

[1197] The recruitment of lymphocytes to areas of inflammation and angiogenesis involves specific receptor-ligand interactions between cell surface adhesion molecules (CAMs) on lymphocytes and the vascular endothelium. The adhesion process, in both normal and pathological settings, follows a multi-step cascade that involves intercellular adhesion molecule-1 (ICAM-1), vascular cell adhesion molecule-1 (VCAM-1), and endothelial leukocyte adhesion molecule-1 (E-selectin) expression on endothelial cells (EC). The expression of these molecules and others on the vascular endothelium determines the efficiency with which leukocytes may adhere to the local vasculature and extravasate into the local tissue during the development of an inflammatory response. The local concentration of cytokines and growth factor participate in the modulation of the expression of these CAMs.

[1198] Tumor necrosis factor alpha (TNF-a), a potent proinflammatory cytokine, is a stimulator of all three CAMs on endothelial cells and may be involved in a wide variety of inflammatory responses, often resulting in a pathological outcome.

[1199] The potential of an agonist or antagonist of the invention to mediate a suppression of TNF-a induced CAM expression can be examined. A modified ELISA assay which uses ECs as a solid phase absorbent is employed to measure the amount of CAM expression on TNF-a treated ECs when co-stimulated with a member of the FGF family of proteins.

[1200] To perform the experiment, human umbilical vein endothelial cell (HUVEC) cultures are obtained from pooled cord harvests and maintained in growth medium (EGM-2; Clonetics, San Diego, CA) supplemented with 10% FCS and 1% penicillin/streptomycin in a 37 degree C. humidified incubator containing 5% C02. HUVECs are seeded in 96-well plates at concentrations of 1×10⁴ cells/well in EGM medium at 37 degree C. for 18-24 hrs or until confluent. The monolayers are subsequently washed 3 times with a serum-free solution of RPMI-1640 supplemented with 100 U/ml penicillin and 100 mg/ml streptomycin, and treated with a given cytokine and/or growth factor(s) for 24 h at 37 degree C. Following incubation, the cells are then evaluated for CAM expression.

[1201] Human Umbilical Vein Endothelial cells (HUVECs) are grown in a standard 96 well plate to confluence. Growth medium is removed from the cells and replaced with 90 ul of 199 Medium (10% FBS). Samples for testing and positive or negative controls are added to the plate in triplicate (in 10 ul volumes). Plates are incubated at 37 degree C. for either 5 h (selectin and integrin expression) or 24 h (integrin expression only). Plates are aspirated to remove medium and 100 μl of 0.1% paraformaldehyde-PBS(with Ca++and Mg++) is added to each well. Plates are held at 4° C. for 30 min.

[1202] Fixative is then removed from the wells and wells are washed IX with PBS(+Ca,Mg)+0.5% BSA and drained. Do not allow the wells to dry. Add 10 μl of diluted primary antibody to the test and control wells. Anti-ICAM-l-Biotin, Anti-VCAM-1-Biotin and Anti-E-selectin-Biotin are used at a concentration of 10 μg/ml (1:10 dilution of 0.1 mg/ml stock antibody). Cells are incubated at 37° C. for 30 min. in a humidified environment. Wells are washed X3 with PBS(+Ca,Mg)+0.5% BSA.

[1203] Then add 20 μl of diluted ExtrAvidin-Alkaline Phosphotase (1:5,000 dilution) to each well and incubated at 37° C. for 30 min. Wells are washed X3 with PBS(+Ca,Mg)+0.5% BSA. I tablet of p-Nitrophenol Phosphate pNPP is dissolved in 5 ml of glycine buffer (pH 10.4). 100 μl of pNPP substrate in glycine buffer is added to each test well. Standard wells in triplicate are prepared from the working dilution of the ExtrAvidin-Alkaline Phosphotase in glycine buffer: 1:5,000 (100)>10⁻⁵>10⁻¹>10^{-1.5}.5 μl of each dilution is added to triplicate wells and the resulting AP content in each well is 5.50 ng, 1.74 ng, 0.55 ng, 0.18 ng. 100 l of pNNP reagent must then be added to each of the standard wells. The plate must be incubated at 37° C. for 4 h. A volume of 50 μl of 3M NaOH is added to all wells. The results are quantified on a plate reader at 405 nm. The background subtraction option is used on blank wells filled with glycine buffer only. The template is set up to indicate the concentration of AP-conjugate in each standard well [5.50 ng; 1.74 ng; 0.55 ng; 0.18 ng]. Results are indicated as amount of bound AP-conjugate in each sample.

[1204] The studies described in this example tested activity of agonists or antagonists of the invention. However, one skilled in the art could easily modify the exemplified studies to test the activity of polynucleotides or polypeptides of the invention (e.g., gene therapy).

### Example 30

### Production of Polypeptide of the Invention for High-throughput Screening Assays

[1205] The following protocol produces a supernatant containing polypeptide of the present invention to be tested. This supernatant can then be used in the Screening Assays described in Examples 32-41.

[1206] First, dilute Poly-D-Lysine (644 587 Boehringer-Mannheim) stock solution (lmg/ml in PBS) 1:20 in PBS (w/o calcium or magnesium 17-516F Biowhittaker) for a working solution of 50ug/ml. Add 200 ul of this solution to each well (24 well plates) and incubate at RT for 20 minutes. Be sure to distribute the solution over each well (note: a 12-channel pipetter may be used with tips on every other channel). Aspirate off the Poly-D-Lysine solution and rinse with lml PBS (Phosphate Buffered Saline). The PBS should remain in the well until just prior to plating the cells and plates may be poly-lysine coated in advance for up to two weeks.

[1207] Plate 293T cells (do not carry cells past P+20) at 2×105 cells/well in .5 ml DMEM(Dulbecco's Modified Eagle Medium)(with 4.5 G/L glucose and L-glutamine (12-604F Biowhittaker))/10% heat inactivated FBS(14-503F Biowhittaker)/1× Penstrep(17-602E Biowhittaker). Let the cells grow overnight.

[1208] The next day, mix together in a sterile solution basin: 300 ul Lipofectamine (18324-012 Gibco/BRL) and 5 ml Optimem 1 (31985070 Gibco/BRL)/96-well plate. With a small volume multi-channel pipetter, aliquot approximately 2ug of an expression vector containing a polynucleotide insert, produced by the methods described in Examples 8-10, into an appropriately labeled 96-well round bottom plate. With a multi-channel pipetter, add 50 ul of the Lipofectamine/Optimem I mixture to each well. Pipette up and down gently to mix. Incubate at RT 15-45 minutes. After about 20 minutes, use a multi-channel pipetter to add 150 ul Optimem I to each well. As a control, one plate of vector DNA lacking an insert should be transfected with each set of transfections.

[1209] Preferably, the transfection should be performed by tag-teaming the following tasks. By tag-teaming, hands on time is cut in half, and the cells do not spend too much time on PBS. First, person A aspirates off the media from four 24-well plates of cells, and then person B rinses each well with 0.5-1 ml PBS. Person A then aspirates off PBS rinse, and person B, using a12-channel pipetter with tips on every other channel, adds the 200 ul of DNA/Lipofectamine/Optimem I complex to the odd wells first, then to the even wells, to each row on the 24-well plates. Incubate at 37 degree C. for 6 hours.

[1210] While cells are incubating, prepare appropriate media, either 1%BSA in DMEM with lx penstrep, or HGS CHO-5 media (116.6 mg/L of CaCI2 (anhyd); 0.00130 mg/L CuSO₄-5H₂O; 0.050 mg/L of Fe(NO₃)₃-9H₂O; 0.417 mg/L of FeSO₄-7H₂O; 311.80 mg/L of Kcl; 28.64 mg/L of MgCl₂; 48.84 mg/L of MgSO₄; 6995.50 mg/L of NaCl; 2400.0 mg/L of NaHCO₃; 62.50 mg/L of NaH₂PO₄-H₂O; 71.02 mg/L of Na₂HPO4; 0.4320 mg/L of ZnSO₄-7H₂O; .002 mg/L of Arachidonic Acid; 1.022 mg/L of Cholesterol; 0.070 mg/L of DL-alpha-Tocopherol-Acetate; 0.0520 mg/L of Linoleic Acid; 0.010 mg/L of Linolenic Acid; 0.010 mg/L of Myristic Acid; 0.010 mg/L of Oleic Acid; 0.010 mg/L of Palmitric Acid; 0.010 mg/L of Palmitic Acid; 100 mg/L of Pluronic F-68; 0.010 mg/L of Stearic Acid; 2.20 mg/L of Tween 80; 4551 mg/L of D-Glucose; 130.85 mg/ml of L-Alanine; 147.50 mg/ml of L-Arginine-HCL; 7.50 mg/ml of L-Asparagine-H₂O; 6.65 mg/ml of L-Aspartic Acid; 29.56 mg/ml of L-Cystine-2HCL-H₂O; 31.29 mg/ml of L-Cystine-2HCL; 7.35 mg/ml of L-Glutamic Acid; 365.0 mg/ml of L-Glutamine; 18.75 mg/ml of Glycine; 52.48 mg/ml of L-Histidine-HCL-H₂O; 106.97 mg/ml of L-Isoleucine; 111.45 mg/ml of L-Leucine; 163.75 mg/ml of L-Lysine HCL; 32.34 mg/ml of L-Methionine; 68.48 mg/ml of L-Phenylalainine; 40.0 mg/ml of L-Proline; 26.25 mg/ml of L-Serine; 101.05 mg/ml of L-Threonine; 19.22 mg/ml of L-Tryptophan; 91.79 mg/ml of L-Tryrosine-2Na-2H₂0; and 99.65 mg/ml of L-Valine; 0.0035 mg/L of Biotin; 3.24 mg/L of D-Ca Pantothenate; 11.78 mg/L of Choline Chloride; 4.65 mg/L of Folic Acid; 15.60 mg/L of i-Inositol; 3.02 mg/L of Niacinamide; 3.00 mg/L of Pyridoxal HCL; 0.031 mg/L of Pyridoxine HCL; 0.319 mg/L of Riboflavin; 3.17 mg/L of Thiamine HCL; 0.365 mg/L of Thymidine; 0.680 mg/L of Vitamin B₁₂; 25 mM of HEPES Buffer; 2.39 mg/L of Na Hypoxanthine; 0.105 mg/L of Lipoic Acid; 0.081 mg/L of Sodium Putrescine-2HCL; 55.0 mg/L of Sodium Pyruvate; 0.0067 mg/L of Sodium Selenite; 2OuM of Ethanolamine; 0.122 mg/L of Ferric Citrate; 41.70 mg/L of Methyl-B-Cyclodextrin complexed with Linoleic Acid; 33.33 mg/L of Methyl-B-Cyclodextrin complexed with Oleic Acid; 10 mg/L of Methyl-B-Cyclodextrin complexed with Retinal Acetate. Adjust osmolarity to 327 mOsm) with 2 mm glutamine and lx penstrep. (BSA (81-068-3 Bayer) 100gm dissolved in IL DMEM for a 10% BSA stock solution). Filter the media and collect 50 ul for endotoxin assay in 15 ml polystyrene conical.

[1211] The transfection reaction is terminated, preferably by tag-teaming, at the end of the incubation period. Person A aspirates off the transfection media, while person B adds 1.5 ml appropriate media to each well. Incubate at 37 degree C. for 45 or 72 hours depending on the media used: 1%BSA for 45 hours or CHO-5 for 72 hours.

[1212] On day four, using a 300 ul multichannel pipetter, aliquot 600 ul in one lml deep well plate and the remaining supernatant into a 2 ml deep well. The supernatants from each well can then be used in the assays described in Examples 32-39.

[1213] It is specifically understood that when activity is obtained in any of the assays described below using a supernatant, the activity originates from either the polypeptide of the present invention directly (e.g., as a secreted protein) or by polypeptide of the present invention inducing expression of other proteins, which are then secreted into the supernatant. Thus, the invention further provides a method of identifying the protein in the supernatant characterized by an activity in a particular assay.

### Example 31

### Construction of GAS Reporter Construct

[1214] One signal transduction pathway involved in the differentiation and proliferation of cells is called the Jaks-STATs pathway. Activated proteins in the Jaks-STATs pathway bind to gamma activation site “GAS” elements or interferon-sensitive responsive element (“ISRE”), located in the promoter of many genes. The binding of a protein to these elements alter the expression of the associated gene.

[1215] GAS and ISRE elements are recognized by a class of transcription factors called Signal Transducers and Activators of Transcription, or “STATs.” There are six members of the STATs family. Statl and Stat3 are present in many cell types, as is Stat2 (as response to IFN-alpha is widespread). Stat4 is more restricted and is not in many cell types though it has been found in T helper class I, cells after treatment with IL-12. Stat5 was originally called mammary growth factor, but has been found at higher concentrations in other cells including myeloid cells. It can be activated in tissue culture cells by many cytokines.

[1216] The STATs are activated to translocate from the cytoplasm to the nucleus upon tyrosine phosphorylation by a set of kinases known as the Janus Kinase (“Jaks”) family. Jaks represent a distinct family of soluble tyrosine kinases and include Tyk2, Jakl, Jak2, and Jak3. These kinases display significant sequence similarity and are generally catalytically inactive in resting cells.

[1217] The Jaks are activated by a wide range of receptors summarized in the Table below. (Adapted from review by Schidler and Darnell, Ann. Rev. Biochem. 64:621-51 (1995)). A cytokine receptor family, capable of activating Jaks, is divided into two groups: (a) Class 1 includes receptors for IL-2, IL-3, IL-4, IL-6, IL-7, IL-9, IL-11, IL-12, IL-15, Epo, PRL, GH, G-CSF, GM-CSF, LIF, CNTF, and thrombopoietin; and (b) Class 2 includes IFN-a, IFN-g, and IL-10. The Class 1 receptors share a conserved cysteine motif (a set of four conserved cysteines and one tryptophan) and a WSXWS motif (a membrane proximal region encoding Trp-Ser-Xaa-Trp-Ser (SEQ ID NO: 2)).

[1218] Thus, on binding of a ligand to a receptor, Jaks are activated, which in turn activate STATs, which then translocate and bind to GAS elements. This entire process is encompassed in the Jaks-STATs signal transduction pathway.

[1219] Therefore, activation of the Jaks-STATs pathway, reflected by the binding of the GAS or the ISRE element, can be used to indicate proteins involved in the proliferation and differentiation of cells. For example, growth factors and cytokines are known to activate the Jaks-STATs pathway (See Table below). Thus, by using GAS elements linked to reporter molecules, activators of the Jaks-STATs pathway can be identified.

| | JAKs | | | | | |
|---|---|---|---|---|---|---|
| Ligand | tyk2 | Jak1 | Jak2 | Jak3 | STATS | GAS (elements) or ISRE |
| IFN family | | | | | | |
| IFN-a/B | + | + | − | − | 1, 2, 3 | ISRE |
| IFN-g | + | + | − | | 1 | GAS (IRF1 > Lys6 > IFP) |
| Il-10 | + | ? | ? | − | 1, 3 | |
| gp130 family | | | | | | |
| IL-6 (Pleiotropic) | + | + | + | ? | 1, 3 | GAS (IRF1 > Lys6 > IFP) |
| Il-11 (Pleiotropic) | ? | + | ? | ? | 1, 3 | |
| OnM (Pleiotropic) | ? | + | + | ? | 1, 3 | |
| LIF (Pleiotropic) | ? | + | + | ? | 1, 3 | |
| CNTF (Pleiotropic) | −/+ | + | + | ? | 1, 3 | |
| G-CSF (Pleiotropic) | ? | + | ? | ? | 1, 3 | |
| IL-12 (Pleiotropic) | + | − | + | + | 1, 3 | |
| g-C family | | | | | | |
| IL-2 (lymphocytes) | − | + | − | + | 1, 3, 5 | GAS |
| IL-4 (lymph/myeloid) | − | + | − | + | 6 | GAS (IRF1 = IFP >> Ly6)(IgH) |
| IL-7 (lymphocytes) | − | + | − | + | 5 | GAS |
| IL-9 (lymphocytes) | − | + | − | + | 5 | GAS |
| IL-13 (lymphocyte) | − | + | ? | ? | 6 | GAS |
| IL-15 | ? | + | ? | + | 5 | GAS |
| gp140 family | | | | | | |
| IL-3 (myeloid) | − | − | + | − | 5 | GAS (IRFI > IFP >> Ly6) |
| IL-5 (myeloid) | − | − | + | − | 5 | GAS |
| GM-CSF (myeloid) | − | − | + | − | 5 | GAS |
| Growth hormone family | | | | | | |
| GH | ? | − | + | − | 5 | |
| PRL | ? | +/− | + | − | 1, 3, 5 | |
| EPO | ? | − | + | − | 5 | GAS (B− |
| CAS > IRF1 = IFP >> Ly6) | | | | | | |
| Receptor Tyrosine Kinases | | | | | | |
| EGF | ? | + | + | − | 1, 3 | GAS (IRFI) |
| PDGF | ? | + | + | − | 1, 3 | |
| CSF-1 | ? | + | + | − | 1, 3 | GAS (not IRF1) |

[1220] To construct a synthetic GAS containing promoter element, which is used in the Biological Assays described in Examples 32-33, a PCR based strategy is employed to generate a GAS-SV40 promoter sequence. The 5′ primer contains four tandem copies of the GAS binding site found in the IRFI promoter and previously demonstrated to bind STATs upon induction with a range of cytokines (Rothman et al., Immunity 1:457-468 (1994).), although other GAS or ISRE elements can be used instead. The 5′ primer also contains 1 8bp of sequence complementary to the SV40 early promoter sequence and is flanked with an XhoI site. The sequence of the 5′ primer is:

| | |
|---|---|
| 5′:GCGCCTCGAGATTTCCCCGAAATCTAGATTTCCCCGAAATGATTTCCCCGA | (SEQ ID NO: 3) |
| AATGATTTCCCCGAAATATCTGCCATCTCAATTAG:3′ | |

[1221] The downstream primer is complementary to the SV40 promoter and is flanked with a Hind III site: 5′:GCGGCAAGCTTTTTGCAAAGCCTAGGC:3′ (SEQ ID NO: 4)

[1222] PCR amplification is performed using the SV40 promoter template present in the B-gal:promoter plasmid obtained from Clontech. The resulting PCR fragment is digested with XhoI/Hind III and subcloned into BLSK2-. (Stratagene.) Sequencing with forward and reverse primers confirms that the insert contains the following sequence:

| | |
|---|---|
| 5′:CTCGAGATTTCCCCGAAATCTAGATTTCCCCGAAATGATTTCCCCGAAATG | (SEQ ID NO: 5) |
| ATTTCCCCGAAATATCTGCCATCTCAATTAGTCAGCAACCATAGTCCCGCCCC | |
| TAACTCCGCCCATCCCGCCCCTAACTCCGCCCAGTTCCGCCCATTCTCCGCCC | |
| CATGGCTGACTAATTTTTTTTATTTATGCAGAGGCCGAGGCCGCCTCGGCCTC | |
| TGAGCTATTCCAGAAGTAGTGAGGAGGCTTTTTTGGAGGCCTAGGCTTTTGCA | |
| AAAAGCTT:3′ | |

[1223] With this GAS promoter element linked to the SV40 promoter, a GAS:SEAP2 reporter construct is next engineered. Here, the reporter molecule is a secreted alkaline phosphatase, or “SEAP.” Clearly, however, any reporter molecule can be instead of SEAP, in this or in any of the other Examples. Well known reporter molecules that can be used instead of SEAP include chloramphenicol acetyltransferase (CAT), luciferase, alkaline phosphatase, B-galactosidase, green fluorescent protein (GFP), or any protein detectable by an antibody.

[1224] The above sequence confirmed synthetic GAS-SV40 promoter element is subcloned into the pSEAP-Promoter vector obtained from Clontech using HindIII and XhoI, effectively replacing the SV40 promoter with the amplified GAS:SV40 promoter element, to create the GAS-SEAP vector. However, this vector does not contain a neomycin resistance gene, and therefore, is not preferred for mammalian expression systems.

[1225] Thus, in order to generate mammalian stable cell lines expressing the GAS-SEAP reporter, the GAS-SEAP cassette is removed from the GAS-SEAP vector using SalI and NotI, and inserted into a backbone vector containing the neomycin resistance gene, such as pGFP-l (Clontech), using these restriction sites in the multiple cloning site, to create the GAS-SEAP/Neo vector. Once this vector is transfected into mammalian cells, this vector can then be used as a reporter molecule for GAS binding as described in Examples 32-33.

[1226] Other constructs can be made using the above description and replacing GAS with a different promoter sequence. For example, construction of reporter molecules containing EGR and NF-KB promoter sequences are described in Examples 34 and 35. However, many other promoters can be substituted using the protocols described in these Examples. For instance, SRE, IL-2, NFAT, or Osteocalcin promoters can be substituted, alone or in combination (e.g., GAS/NF-KB/EGR, GASINF-KB, Il-2/NFAT, or NF-KB/GAS). Similarly, other cell lines can be used to test reporter construct activity, such as HELA (epithelial), HUVEC (endothelial), Reh (B-cell), Saos-2 (osteoblast), HUVAC (aortic), or Cardiomyocyte.

### Example 32

### High-throughput Screening Assay for T-cell Activity

[1227] The following protocol is used to assess T-cell activity by identifying factors, and determining whether sup emate containing a polypeptide of the invention proliferates and/or differentiates T-cells. T-cell activity is assessed using the GAS/SEAP/Neo construct produced in Example 31. Thus, factors that increase SEAP activity indicate the ability to activate the Jaks-STATS signal transduction pathway. The T-cell used in this assay is Jurkat T-cells (ATCC Accession No. TIB-152), although Molt-3 cells (ATCC Accession No. CRL-1552) and Molt-4 cells (ATCC Accession No. CRL-1582) cells can also be used.

[1228] Jurkat T-cells are lymphoblastic CD4+ Th1 helper cells. In order to generate stable cell lines, approximately 2 million Jurkat cells are transfected with the GAS-SEAPIneo vector using DMRIE-C (Life Technologies)(transfection procedure described below). The transfected cells are seeded to a density of approximately 20,000 cells per well and transfectants resistant to 1 mg/ml genticin selected. Resistant colonies are expanded and then tested for their response to increasing concentrations of interferon gamma. The dose response of a selected clone is demonstrated.

[1229] Specifically, the following protocol will yield sufficient cells for 75 wells containing 200 ul of cells. Thus, it is either scaled up, or performed in multiple to generate sufficient cells for multiple 96 well plates. Jurkat cells are maintained in RPMI+10% serum with 1%Pen-Strep. Combine 2.5 mls of OPTI-MEM (Life Technologies) with 10 ug of plasmid DNA in a T25 flask. Add 2.5 ml OPTI-MEM containing 50 ul of DMRIE-C and incubate at room temperature for 15-45 mins.

[1230] During the incubation period, count cell concentration, spin down the required number of cells (10⁷ per transfection), and resuspend in OPTI-MEM to a final concentration of 10⁷ cells/ml. Then add iml of 1×10⁷ cells in OPTI-MEM to T25 flask and incubate at 37 degree C. for 6 hrs. After the incubation, add 10 ml of RPMI+15% serum.

[1231] The Jurkat:GAS-SEAP stable reporter lines are maintained in RPMI+10% serum, 1 mg/ml Genticin, and 1% Pen-Strep. These cells are treated with supernatants containing polypeptide of the present invention or polypeptide of the present invention induced polypeptides as produced by the protocol described in Example 30.

[1232] On the day of treatment with the supernatant, the cells should be washed and resuspended in fresh RPMI+10% serum to a density of 500,000 cells per ml. The exact number of cells required will depend on the number of supernatants being screened. For one 96 well plate, approximately 10 million cells (for 10 plates, 100 million cells) are required.

[1233] Transfer the cells to a triangular reservoir boat, in order to dispense the cells into a 96 well dish, using a 12 channel pipette. Using a 12 channel pipette, transfer 200 ul of cells into each well (therefore adding 100,000 cells per well).

[1234] After all the plates have been seeded, 50 ul of the supernatants are transferred directly from the 96 well plate containing the supernatants into each well using a 12 channel pipette. In addition, a dose of exogenous interferon gamma (0.1, 1.0, 10 ng) is added to wells H9, H10, and H11 to serve as additional positive controls for the assay.

[1235] The 96 well dishes containing Jurkat cells treated with supernatants are placed in an incubator for 48 hrs (note: this time is variable between 48-72 hrs). 35 ul samples from each well are then transferred to an opaque 96 well plate using a 12 channel pipette. The opaque plates should be covered (using sellophene covers) and stored at −20 degree C. until SEAP assays are performed according to Example 36. The plates containing the remaining treated cells are placed at 4 degree C. and serve as a source of material for repeating the assay on a specific well if desired.

[1236] As a positive control, 100 Unit/ml interferon gamma can be used which is known to activate Jurkat T cells. Over 30 fold induction is typically observed in the positive control wells.

[1237] The above protocol may be used in the generation of both transient, as well as, stable transfected cells, which would be apparent to those of skill in the art.

### Example 33

### High-throughput Screening Assay Identifying Myeloid Activity

[1238] The following protocol is used to assess myeloid activity of polypeptide of the present invention by determining whether polypeptide of the present invention proliferates and/or differentiates myeloid cells. Myeloid cell activity is assessed using the GAS/SEAP/Neo construct produced in Example 31. Thus, factors that increase SEAP activity indicate the ability to activate the Jaks-STATS signal transduction pathway. The myeloid cell used in this assay is U937, a pre-monocyte cell line, although TF-1, HL60, or KG1 can be used.

[1239] To transiently transfect U937 cells with the GAS/SEAP/Neo construct produced in Example 31, a DEAE-Dextran method (Kharbanda et. al., 1994, Cell Growth & Differentiation, 5:259-265) is used. First, harvest 2×10⁷ U937 cells and wash with PBS. The U937 cells are usually grown in RPMI 1640 medium containing 10% heat-inactivated fetal bovine serum (FBS) supplemented with 100 units/ml penicillin and 100 mg/ml streptomycin.

[1240] Next, suspend the cells in 1 ml of 20 mM Tris-HCl (pH 7.4) buffer containing 0.5 mg/ml DEAE-Dextran, 8 ug GAS-SEAP2 plasmid DNA, 140 mM NaCl, 5 mM KCl, 375 uM Na₂HPO₄.7H₂O, 1 mM MgCl₂, and 675 uM CaCI₂. Incubate at 37 degrees C. for 45 min.

[1241] Wash the cells with RPMI 1640 medium containing 10% FBS and then resuspend in 10 ml complete medium and incubate at 37 degree C. for 36 hr.

[1242] The GAS-SEAP/U937 stable cells are obtained by growing the cells in 400 ug/ml G418. The G418-free medium is used for routine growth but every one to two months, the cells should be re-grown in 400 ug/ml G418 for couple of passages.

[1243] These cells are tested by harvesting 1×10⁸ cells (this is enough for ten 96-well plates assay) and wash with PBS. Suspend the cells in 200 ml above described growth medium, with a final density of 5×10⁵ cells/ml. Plate 200 ul cells per well in the 96-well plate (or 1×10⁵ cells/well).

[1244] Add 50 ul of the supernatant prepared by the protocol described in Example 30. Incubate at 37 degee C for 48 to 72 hr. As a positive control, 100 Unit/ml interferon gamma can be used which is known to activate U937 cells. Over 30 fold induction is typically observed in the positive control wells. SEAP assay the supernatant according to the protocol described in Example 36.

### Example 34

### High-throughput Screening Assay Identifying Neuronal Activity

[1245] When cells undergo differentiation and proliferation, a group of genes are activated through many different signal transduction pathways. One of these genes, EGR1 (early growth response gene 1), is induced in various tissues and cell types upon activation. The promoter of EGRI is responsible for such induction. Using the EGRI promoter linked to reporter molecules, activation of cells can be assessed by polypeptide of the present invention.

[1246] Particularly, the following protocol is used to assess neuronal activity in PC12 cell lines. PC12 cells (rat phenochromocytoma cells) are known to proliferate and/or differentiate by activation with a number of mitogens, such as TPA (tetradecanoyl phorbol acetate), NGF (nerve growth factor), and EGF (epidermal growth factor). The EGRI gene expression is activated during this treatment. Thus, by stably transfecting PC12 cells with a construct containing an EGR promoter linked to SEAP reporter, activation of PC12 cells by polypeptide of the present invention can be assessed.

[1247] The EGR/SEAP reporter construct can be assembled by the following protocol. The EGR-1 promoter sequence (-633 to +l)(Sakamoto K et al., Oncogene 6:867-871 (1991)) can be PCR amplified from human genomic DNA using the following primers:

| | |
|---|---|
| 5′GCGCTCGAGGGATGACAGCGATAGAACCCCGG-3′ | (SEQ ID |
| | NO: 6) |
| 5′GCGAAGCTTCGCGACTCCCCGGATCCGCCTC-3′ | (SEQ ID |
| | NO: 7) |

[1248] Using the GAS:SEAP/Neo vector produced in Example 31, EGRI amplified product can then be inserted into this vector. Linearize the GAS:SEAP/Neo vector using restriction enzymes XhoI/HindIII, removing the GAS/SV40 stuffer. Restrict the EGRI amplified product with these same enzymes. Ligate the vector and the EGRI promoter.

[1249] To prepare 96 well-plates for cell culture, two mls of a coating solution (1:30 dilution of collagen type I (Upstate Biotech Inc. Cat#08-115) in 30% ethanol (filter sterilized)) is added per one 10 cm plate or 50 ml per well of the 96-well plate, and allowed to air dry for 2 hr.

[1250] PC12 cells are routinely grown in RPMI-1640 medium (Bio Whittaker) containing 10% horse serum (JRH BIOSCIENCES, Cat. # 12449-78P), 5% heat-inactivated fetal bovine serum (FBS) supplemented with 100 units/ml penicillin and 100 ug/ml streptomycin on a precoated 10 cm tissue culture dish. One to four split is done every three to four days. Cells are removed from the plates by scraping and resuspended with pipetting up and down for more than 15 times.

[1251] Transfect the EGR/SEAP/Neo construct into PC12 using the Lipofectamine protocol described in Example 30. EGR-SEAP/PC12 stable cells are obtained by growing the cells in 300 ug/ml G418. The G418-free medium is used for routine growth but every one to two months, the cells should be re-grown in 300 ug/ml G418 for couple of passages.

[1252] To assay for neuronal activity, a 10 cm plate with cells around 70 to 80% confluent is screened by removing the old medium. Wash the cells once with PBS (Phosphate buffered saline). Then starve the cells in low serum medium (RPMI-1640 containing 1% horse serum and 0.5% FBS with antibiotics) overnight.

[1253] The next morning, remove the medium and wash the cells with PBS. Scrape off the cells from the plate, suspend the cells well in 2 ml low serum medium. Count the cell number and add more low serum medium to reach final cell density as 5×10⁵ cells/ml.

[1254] Add 200 ul of the cell suspension to each well of 96-well plate (equivalent to 1×10⁵ cells/well). Add 50 ul supernatant produced by Example 30, 37 degree C. for 48 to 72 hr. As a positive control, a growth factor known to activate PC12 cells through EGR can be used, such as 50 ng/ul of Neuronal Growth Factor (NGF). Over fifty-fold induction of SEAP is typically seen in the positive control wells. SEAP assay the supernatant according to Example 36.

### Example 35

### High-throughput Screening Assay for T-cell Activity

[1255] NF-KB (Nuclear Factor KB) is a transcription factor activated by a wide variety of agents including the inflammatory cytokines IL-1 and TNF, CD30 and CD40, lymphotoxin-alpha and lymphotoxin-beta, by exposure to LPS or thrombin, and by expression of certain viral gene products. As a transcription factor, NF-KB regulates the expression of genes involved in immune cell activation, control of apoptosis (NF-KB appears to shield cells from apoptosis), B and T-cell development, anti-viral and antimicrobial responses, and multiple stress responses.

[1256] In non-stimulated conditions, NF-KB is retained in the cytoplasm with I-KB (Inhibitor KB). However, upon stimulation, I-KB is phosphorylated and degraded, causing NF-KB to shuttle to the nucleus, thereby activating transcription of target genes. Target genes activated by NF-KB include IL-2, IL-6, GM-CSF, ICAM-1 and class 1 MHC.

[1257] Due to its central role and ability to respond to a range of stimuli, reporter constructs utilizing the NF-KB promoter element are used to screen the supernatants produced in Example 30. Activators or inhibitors of NF-KB would be useful in treating, preventing, and/or diagnosing diseases. For example, inhibitors of NF-KB could be used to treat those diseases related to the acute or chronic activation of NF-KB, such as rheumatoid arthritis.

[1258] To construct a vector containing the NF-KB promoter element, a PCR based strategy is employed. The upstream primer contains four tandem copies of the NF-KB binding site (GGGGACTTTCCC) (SEQ ID NO: 8), 18 bp of sequence complementary to the 5′ end of the SV40 early promoter sequence, and is flanked with an XhoI site:

| | |
|---|---|
| 5′:GCGGCCTCGAGGGGACTTTCCCGGGGACTTTCCGGGGACTTTCCGGGACTT | (SEQ ID NO: 9) |
| TCCATCCTGCCATCTCAATTAG:3′ | |

[1259] The downstream primer is complementary to the 3′ end of the SV40 promoter and is flanked with a Hind III site:

| | |
|---|---|
| 5′:GCGGCAAGCTTTTTGCAAAGCCTAGGC:3′ | (SEQ ID NO: 4) |

[1260] PCR amplification is performed using the SV40 promoter template present in the pB-gal:promoter plasmid obtained from Clontech. The resulting PCR fragment is digested with XhoI and Hind III and subcloned into BLSK2-. (Stratagene) Sequencing with the T7 and T3 primers confirms the insert contains the following sequence:

| | |
|---|---|
| 5′:CTCGAGGGGACTTTCCCGGGGACTTTCCGGGGACTTTCCGGGACTTTCCAT | (SEQ ID NO: 10) |
| CTGCCATCTCAATTAGTCAGCAACCATAGTCCCGCCCCTAACTCCGCCCATCC | |
| CGCCCCTAACTCCGCCCAGTTCCGCCCATTCTCCGCCCCATGGCTGACTAATT | |
| TTTTTTATTTATGCAGAGGCCGAGGCCGCCTCGGCCTCTGAGCTATTCCAGAA | |
| GTAGTGAGGAGGCTTTTTTGGAGGCCTAGGCTTTTGCAAAAAGCTT:3′ | |

[1261] Next, replace the SV40 minimal promoter element present in the pSEAP2-promoter plasmid (Clontech) with this NF-KB/SV40 fragment using XhoI and HindlIl. However, this vector does not contain a neomycin resistance gene, and therefore, is not preferred for mammalian expression systems.

[1262] In order to generate stable mammalian cell lines, the NF-KB/SV40/SEAP cassette is removed from the above NF-KB/SEAP vector using restriction enzymes SalI and NotI, and inserted into a vector containing neomycin resistance. Particularly, the NF-KB/SV40/SEAP cassette was inserted into pGFP-1 (Clontech), replacing the GFP gene, after restricting pGFP-1 with SalI and NotI.

[1263] Once NF-KB/SV40/SEAP/Neo vector is created, stable Jurkat T-cells are created and maintained according to the protocol described in Example 32. Similarly, the method for assaying supernatants with these stable Jurkat T-cells is also described in Example 32. As a positive control, exogenous TNF alpha (0.1,1, 10 ng) is added to wells H9, H10, and Hi 1, with a 5-10 fold activation typically observed.

### Example 36

### Assay for SEAP Activity

[1264] As a reporter molecule for the assays described in Examples 32-35, SEAP activity is assayed using the Tropix Phospho-light Kit (Cat. BP-400) according to the following general procedure. The Tropix Phospho-light Kit supplies the Dilution, Assay, and Reaction Buffers used below.

[1265] Prime a dispenser with the 2.5× Dilution Buffer and dispense 15 ul of 2.5× dilution buffer into Optiplates containing 35 ul of a supernatant. Seal the plates with a plastic sealer and incubate at 65 degree C. for 30 min. Separate the Optiplates to avoid uneven heating.

[1266] Cool the samples to room temperature for 15 minutes. Empty the dispenser and prime with the Assay Buffer. Add 50 ml Assay Buffer and incubate at room temperature 5 min. Empty the dispenser and prime with the Reaction Buffer (see the Table below). Add 50 ul Reaction Buffer and incubate at room temperature for 20 minutes. Since the intensity of the chemiluminescent signal is time dependent, and it takes about 10 minutes to read 5 plates on a luminometer, thus one should treat 5 plates at each time and start the second set 10 minutes later.

[1267] Read the relative light unit in the luminometer. Set H12 as blank, and print the results. An increase in chemiluminescence indicates reporter activity.

Reaction Buffer Formulation:

| # of plates | Rxn buffer diluent (ml) | CSPD (ml) |
|---|---|---|
| 10 | 60 | 3 |
| 11 | 65 | 3.25 |
| 12 | 70 | 3.5 |
| 13 | 75 | 3.75 |
| 14 | 80 | 4 |
| 15 | 85 | 4.25 |
| 16 | 90 | 4.5 |
| 17 | 95 | 4.75 |
| 18 | 100 | 5 |
| 19 | 105 | 5.25 |
| 20 | 110 | 5.5 |
| 21 | 115 | 5.75 |
| 22 | 120 | 6 |
| 23 | 125 | 6.25 |
| 24 | 130 | 6.5 |
| 25 | 135 | 6.75 |
| 26 | 140 | 7 |
| 27 | 145 | 7.25 |
| 28 | 150 | 7.5 |
| 29 | 155 | 7.75 |
| 30 | 160 | 8 |
| 31 | 165 | 8.25 |
| 32 | 170 | 8.5 |
| 33 | 175 | 8.75 |
| 34 | 180 | 9 |
| 35 | 185 | 9.25 |
| 36 | 190 | 9.5 |
| 37 | 195 | 9.75 |
| 38 | 200 | 10 |
| 39 | 205 | 10.25 |
| 40 | 210 | 10.5 |
| 41 | 215 | 10.75 |
| 42 | 220 | 11 |
| 43 | 225 | 11.25 |
| 44 | 230 | 11.5 |
| 45 | 235 | 11.75 |
| 46 | 240 | 12 |
| 47 | 245 | 12.25 |
| 48 | 250 | 12.5 |
| 49 | 255 | 12.75 |
| 50 | 260 | 13 |

### Example 37

### High-throughput Screening Assay Identifying Changes in Small Molecule Concentration and Membrane Permeability

[1268] Binding of a ligand to a receptor is known to alter intracellular levels of small moilecules, such as calcium, potassium, sodium, and pH, as well as alter membrane potential. These alterations can be measured in an assay to identify supernatants which bind to receptors of a particular cell. Although the following protocol describes an assay for calcium, this protocol can easily be modified to detect changes in potassium, sodium, pH, membrane potential, or any other small molecule which is detectable by a fluorescent probe.

[1269] The following assay uses Fluorometric Imaging Plate Reader (“FLIPR”) to measure changes in fluorescent molecules (Molecular Probes) that bind small molecules. Clearly, any fluorescent molecule detecting a small molecule can be used instead of the calcium fluorescent molecule, fluo-4 (Molecular Probes, Inc.; catalog no. F-14202), used here.

[1270] For adherent cells, seed the cells at 10,000-20,000 cells/well in a Co-star black 96-well plate with clear bottom. The plate is incubated in a CO₂ incubator for 20 hours. The adherent cells are washed two times in Biotek washer with 200 ul of HBSS (Hank's Balanced Salt Solution) leaving 100 ul of buffer after the final wash.

[1271] A stock solution of 1 mg/ml fluo-4 is made in 10% pluronic acid DMSO. To load the cells with fluo-4, 50 ul of 12 ug/ml fluo-4 is added to each well. The plate is incubated at 37 degrees C. in a CO₂ incubator for 60 min. The plate is washed four times in the Biotek washer with HBSS leaving 100 ul of buffer.

[1272] For non-adherent cells, the cells are spun down from culture media. Cells are re-suspended to 2-5×10⁶ cells/ml with HBSS in a 50-ml conical tube. 4 ul of 1 mg/ml fluo-4 solution in 10% pluronic acid DMSO is added to each ml of cell suspension. The tube is then placed in a 37 degrees C. water bath for 30-60 min. The cells are washed twice with HBSS, resuspended to 1×10⁶ cells/ml, and dispensed into a microplate, 100 ul/well. The plate is centrifuged at 1000 rpm for 5 min. The plate is then washed once in Denley Cell Wash with 200 ul, followed by an aspiration step to 100 ul final volume.

[1273] For a non-cell based assay, each well contains a fluorescent molecule, such as fluo-4. The supernatant is added to the well, and a change in fluorescence is detected.

[1274] To measure the fluorescence of intracellular calcium, the FLIPR is set for the following parameters: (1) System gain is 300-800 mW; (2) Exposure time is 0.4 second; (3) Camera F/stop is F/2; (4) Excitation is 488 nm; (5) Emission is 530 nm; and (6) Sample addition is 50 ul. Increased emission at 530 nm indicates an extracellular signaling event caused by the a molecule, either polypeptide of the present invention or a molecule induced by polypeptide of the present invention, which has resulted in an increase in the intracellular Ca++ concentration.

### Example 38

### High-throughput Screening Assay Identifying Tyrosine Kinase Activity

[1275] The Protein Tyrosine Kinases (PTK) represent a diverse group of transmembrane and cytoplasmic kinases. Within the Receptor Protein Tyrosine Kinase RPTK) group are receptors for a range of mitogenic and metabolic growth factors including the PDGF, FGF, EGF, NGF, HGF and Insulin receptor subfamilies. In addition there are a large family of RPTKs for which the corresponding ligand is unknown. Ligands for RPTKs include mainly secreted small proteins, but also membrane-bound and extracellular matrix proteins.

[1276] Activation of RPTK by ligands involves ligand-mediated receptor dimerization, resulting in transphosphorylation of the receptor subunits and activation of the cytoplasmic tyrosine kinases. The cytoplasmic tyrosine kinases include receptor associated tyrosine kinases of the src-family (e.g., src, yes, lck, lyn, fyn) and non-receptor linked and cytosolic protein tyrosine kinases, such as the Jak family, members of which mediate signal transduction triggered by the cytokine superfamily of receptors (e.g., the Interleukins, Interferons, GM-CSF, and Leptin).

[1277] Because of the wide range of known factors capable of stimulating tyrosine kinase activity, identifying whether polypeptide of the present invention or a molecule induced by polypeptide of the present invention is capable of activating tyrosine kinase signal transduction pathways is of interest. Therefore, the following protocol is designed to identify such molecules capable of activating the tyrosine kinase signal transduction pathways.

[1278] Seed target cells (e.g., primary keratinocytes) at a density of approximately 25,000 cells per well in a 96 well Loprodyne Silent Screen Plates purchased from Nalge Nunc (Naperville, Ill.). The plates are sterilized with two 30 minute rinses with 100% ethanol, rinsed with water and dried overnight. Some plates are coated for 2 hr with 100 ml of cell culture grade type I collagen (50 mg/ml), gelatin (2%) or polylysine (50 mg/ml), all of which can be purchased from Sigma Chemicals (St. Louis, Mo.) or 10% Matrigel purchased from Becton Dickinson (Bedford,Mass.), or calf serum, rinsed with PBS and stored at 4 degree C. Cell growth on these plates is assayed by seeding 5,000 cells/well in growth medium and indirect quantitation of cell number through use of alamarBlue as described by the manufacturer Alamar Biosciences, Inc. (Sacramento, Calif.) after 48 hr. Falcon plate covers #3071 from Becton Dickinson (Bedford,Mass.) are used to cover the Loprodyne Silent Screen Plates. Falcon Microtest III cell culture plates can also be used in some proliferation experiments.

[1279] To prepare extracts, A431 cells are seeded onto the nylon membranes of Loprodyne plates (20,000/200 ml/well) and cultured overnight in complete medium . Cells are quiesced by incubation in serum-free basal medium for 24 hr. After 5-20 minutes treatment with EGF (60 ng/ml) or 50 ul of the supernatant produced in Example 30, the medium was removed and 100 ml of extraction buffer ((20 mM HEPES pH 7.5, 0.15 M NaCl, 1% Triton X-100, 0.1% SDS, 2 mM Na3VO4, 2 mM Na4P207 and a cocktail of protease inhibitors (# 1836170) obtained from Boeheringer Mannheim (Indianapolis, Ind.)) is added to each well and the plate is shaken on a rotating shaker for 5 minutes at 4° C. The plate is then placed in a vacuum transfer manifold and the extract filtered through the 0.45 mm membrane bottoms of each well using house vacuum. Extracts are collected in a 96-well catch/assay plate in the bottom of the vacuum manifold and immediately placed on ice. To obtain extracts clarified by centrifugation, the content of each well, after detergent solubilization for 5 minutes, is removed and centrifuged for 15 minutes at 4 degree C. at 16,000× g.

[1280] Test the filtered extracts for levels of tyrosine kinase activity. Although many methods of detecting tyrosine kinase activity are known, one method is described here.

[1281] Generally, the tyrosine kinase activity of a supernatant is evaluated by determining its ability to phosphorylate a tyrosine residue on a specific substrate (a biotinylated peptide). Biotinylated peptides that can be used for this purpose include PSK1 (corresponding to amino acids 6-20 of the cell division kinase cdc2-p34) and PSK2 (corresponding to amino acids 1-17 of gastrin). Both peptides are substrates for a range of tyrosine kinases and are available from Boehringer Mannheim.

[1282] The tyrosine kinase reaction is set up by adding the following components in order. First, add 10 ul of SuM Biotinylated Peptide, then 10 ul ATP/Mg₂₊ (5 mM ATP/50 mM MgCl₂), then 10 ul of 5× Assay Buffer (4OmM imidazole hydrochloride, pH7.3, 40 mM beta-glycerophosphate, lmM EGTA, 10OmM MgCl₂, 5 mM MnCl₂, 0.5 mg/ml BSA), then 5 ul of Sodium Vanadate (1 mM), and then 5 ul of water. Mix the components gently and preincubate the reaction mix at 30 degree C. for 2 min. Initial the reaction by adding 10 ul of the control enzyme or the filtered supernatant.

[1283] The tyrosine kinase assay reaction is then terminated by adding 10 ul of 120 mm EDTA and place the reactions on ice.

[1284] Tyrosine kinase activity is determined by transferring 50 ul aliquot of reaction mixture to a microtiter plate (MTP) module and incubating at 37 degree C. for 20 min. This allows the streptavidin coated 96 well plate to associate with the biotinylated peptide. Wash the MTP module with 300 ul/well of PBS four times. Next add 75 ul of anti-phospotyrosine antibody conjugated to horse radish peroxidase(anti-P-Tyr-POD(0.5u/ml)) to each well and incubate at 37 degree C. for one hour. Wash the well as above.

[1285] Next add 100 ul of peroxidase substrate solution (Boehringer Mannheim) and incubate at room temperature for at least 5 mins (up to 30 min). Measure the absorbance of the sample at 405 nm by using ELISA reader. The level of bound peroxidase activity is quantitated using an ELISA reader and reflects the level of tyrosine kinase activity.

### Example 39

### High-throughput Screening Assay Identifying Phosphorylation Activity

[1286] As a potential alternative and/or complement to the assay of protein tyrosine kinase activity described in Example 38, an assay which detects activation (phosphorylation) of major intracellular signal transduction intermediates can also be used. For example, as described below one particular assay can detect tyrosine phosphorylation of the Erk-1 and Erk-2 kinases. However, phosphorylation of other molecules, such as Raf, JNK, p38 MAP, Map kinase kinase (MEK), MEK kinase, Src, Muscle specific kinase (MuSK), IRAK, Tec, and Janus, as well as any other phosphoserine, phosphotyrosine, or phosphothreonine molecule, can be detected by substituting these molecules for Erk-1 or Erk-2 in the following assay.

[1287] Specifically, assay plates are made by coating the wells of a 96-well ELISA plate with 0.1 ml of protein G (lug/ml) for 2 hr at room temp, (RT). The plates are then rinsed with PBS and blocked with 3% BSA/PBS for 1 hr at RT. The protein G plates are then treated with 2 commercial monoclonal antibodies (10 ng/well) against Erk-1 and Erk-2 (1 hr at RT) (Santa Cruz Biotechnology). (To detect other molecules, this step can easily be modified by substituting a monoclonal antibody detecting any of the above described molecules.) After 3-5 rinses with PBS, the plates are stored at 4 degree C. until use.

[1288] A431 cells are seeded at 20,000/well in a 96-well Loprodyne filterplate and cultured overnight in growth medium. The cells are then starved for 48 hr in basal medium (DMEM) and then treated with EGF (6 ng/well) or 50 ul of the supernatants obtained in Example 30 for 5-20 minutes. The cells are then solubilized and extracts filtered directly into the assay plate.

[1289] After incubation with the extract for 1 hr at RT, the wells are again rinsed. As a positive control, a commercial preparation of MAP kinase (lOng/well) is used in place of A431 extract. Plates are then treated with a commercial polyclonal (rabbit) antibody (lug/ml) which specifically recognizes the phosphorylated epitope of the Erk-1 and Erk-2 kinases (1 hr at RT). This antibody is biotinylated by standard procedures. The bound polyclonal antibody is then quantitated by successive incubations with Europium-streptavidin and Europium fluorescence enhancing reagent in the Wallac DELFIA instrument (time-resolved fluorescence). An increased fluorescent signal over background indicates a phosphorylation by polypeptide of the present invention or a molecule induced by polypeptide of the present invention.

### Example 40

### Assay for the Stimulation of Bone Marrow CD34+ Cell Proliferation

[1290] This assay is based on the ability of human CD34+ to proliferate in the presence of hematopoietic growth factors and evaluates the ability of isolated polypeptides expressed in mammalian cells to stimulate proliferation of CD34+ cells.

[1291] It has been previously shown that most mature precursors will respond to only a single signal. More immature precursors require at least two signals to respond. Therefore, to test the effect of polypeptides on hematopoietic activity of a wide range of progenitor cells, the assay contains a given polypeptide in the presence or absence of other hematopoietic growth factors. Isolated cells are cultured for 5 days in the presence of Stem Cell Factor (SCF) in combination with tested sample. SCF alone has a very limited effect on the proliferation of bone marrow (BM) cells, acting in such conditions only as a “survival” factor. However, combined with any factor exhibiting stimulatory effect on these cells (e.g., IL-3), SCF will cause a synergistic effect. Therefore, if the tested polypeptide has a stimulatory effect on hematopoietic progenitors, such activity can be easily detected. Since normal BM cells have a low level of cycling cells, it is likely that any inhibitory effect of a given polypeptide, or agonists or antagonists thereof, might not be detected. Accordingly, assays for an inhibitory effect on progenitors is preferably tested in cells that are first subjected to in vitro stimulation with SCF+IL+3, and then contacted with the compound that is being evaluated for inhibition of such induced proliferation.

[1292] Briefly, CD34+ cells are isolated using methods known in the art. The cells are thawed and resuspended in medium (QBSF 60 serum-free medium with 1% L-glutamine (500 ml) Quality Biological, Inc., Gaithersburg, MD Cat# 160-204-101). After several gentle centrifugation steps at 200× g, cells are allowed to rest for one hour. The cell count is adjusted to 2.5×10⁵ cells/ml. During this time, 100 μl of sterile water is added to the peripheral wells of a 96-well plate. The cytokines that can be tested with a given polypeptide in this assay is rhSCF (R&D Systems, Minneapolis, MN, Cat# 255-SC) at 50 ng/ml alone and in combination with rhSCF and rhIL-3 (R&D Systems, Minneapolis, MN, Cat# 203-ML) at 30 ng/ml. After one hour, 10 μl of prepared cytokines, 50 μl of the supernatants prepared in Example 30 (supernatants at 1:2 dilution=50 μl) and 20 μl of diluted cells are added to the media which is already present in the wells to allow for a final total volume of 100 μl. The plates are then placed in a 37° C./5% CO₂ incubator for five days.

[1293] Eighteen hours before the assay is harvested, 0.5 μCi/well of [3H] Thymidine is added in a 10 μl volume to each well to determine the proliferation rate. The experiment is terminated by harvesting the cells from each 96-well plate to a filtermat using the Tomtec Harvester 96. After harvesting, the filtermats are dried, trimmed and placed into OmniFilter assemblies consisting of one OmniFilter plate and one OmniFilter Tray. 60 μl Microscint is added to each well and the plate sealed with TopSeal-A press-on sealing film A bar code 15 sticker is affixed to the first plate for counting. The sealed plates are then loaded and the level of radioactivity determined via the Packard Top Count and the printed data collected for analysis. The level of radioactivity reflects the amount of cell proliferation.

[1294] The studies described in this example test the activity of a given polypeptide to stimulate bone marrow CD34+ cell proliferation. One skilled in the art could easily modify the exemplified studies to test the activity of polynucleotides (e.g., gene therapy), antibodies, agonists, and/or antagonists and fragments and variants thereof. As a nonlimiting example, potential antagonists tested in this assay would be expected to inhibit cell proliferation in the presence of cytokines and/or to increase the inhibition of cell proliferation in the presence of cytokines and a given polypeptide. In contrast, potential agonists tested in this assay would be expected to enhance cell proliferation and/or to decrease the inhibition of cell proliferation in the presence of cytokines and a given polypeptide.

[1295] The ability of a gene to stimulate the proliferation of bone marrow CD34+ cells indicates that polynucleotides and polypeptides corresponding to the gene are useful for the diagnosis and treatment of disorders affecting the immune system and hematopoiesis. Representative uses are described in the “Immune Activity” and “Infectious Disease” sections above, and elsewhere herein.

### Example 41

### Assay for Extracellular Matrix Enhanced Cell Response (EMECR)

[1296] The objective of the Extracellular Matrix Enhanced Cell Response (EMECR) assay is to identify gene products (e.g., isolated polypeptides) that act on the hematopoietic stem cells in the context of the extracellular matrix (ECM) induced signal.

[1297] Cells respond to the regulatory factors in the context of signal(s) received from the surrounding microenvironment. For example, fibroblasts, and endothelial and epithelial stem cells fail to replicate in the absence of signals from the ECM. Hematopoietic stem cells can undergo self-renewal in the bone marrow, but not in in vitro suspension culture. The ability of stem cells to undergo self-renewal in vitro is dependent upon their interaction with the stromal cells and the ECM protein fibronectin (fn). Adhesion of cells to fn is mediated by the α₅.β₁ and α₄.β₁ integrin receptors, which are expressed by human and mouse hematopoietic stem cells. The factor(s) which integrate with the ECM environment and are responsible for stimulating stem cell self-renewal havea not yet been identified. Discovery of such factors should be of great interest in gene therapy and bone marrow transplant applications

[1298] Briefly, polystyrene, non tissue culture treated, 96-well plates are coated with fn fragment at a coating concentration of 0.2 μg/cm². Mouse bone marrow cells are plated (1,000 cells/well) in 0.2 ml of serum-free medium. Cells cultured in the presence of IL-3 (5 ng/ml) +SCF (50 ng/ml) would serve as the positive control, conditions under which little self-renewal but pronounced differentiation of the stem cells is to be expected. Gene products of the invention (e.g., including, but not limited to, polynucleotides and polypeptides of the present invention, and supernatants produced in Example 30), are tested with appropriate negative controls in the presence and absence of SCF(5.0 ng/ml), where test factor supernatants represent 10% of the total assay volume. The plated cells are then allowed to grow by incubating in a low oxygen environment (5% CO₂, 7% O₂, and 88% N₂) tissue culture incubator for 7 days. The number of proliferating cells within the wells is then quantitated by measuring thymidine incorporation into cellular DNA. Verification of the positive hits in the assay will require phenotypic characterization of the cells, which can be accomplished by scaling up of the culture system and using appropriate antibody reagents against cell surface antigens and FACScan.

[1299] One skilled in the art could easily modify the exemplified studies to test the activity of polynucleotides (e.g., gene therapy), antibodies, agonists, and/or antagonists and fragments and variants thereof.

[1300] If a particular polypeptide of the present invention is found to be a stimulator of hematopoietic progenitors, polynucleotides and polypeptides corresponding to the gene encoding said polypeptide may be useful for the diagnosis and treatment of disorders affecting the immune system and hematopoiesis. Representative uses are described in the “Immune Activity” and “Infectious Disease” sections above, and elsewhere herein. The gene product may also be useful in the expansion of stem cells and committed progenitors of various blood lineages, and in the differentiation and/or proliferation of various cell types.

[1301] Additionally, the polynucleotides and/or polypeptides of the gene of interest and/or agonists and/or antagonists thereof, may also be employed to inhibit the proliferation and differentiation of hematopoietic cells and therefore may be employed to protect bone marrow stem cells from chemotherapeutic agents during chemotherapy. This antiproliferative effect may allow administration of higher doses of chemotherapeutic agents and, therefore, more effective chemotherapeutic treatment.

[1302] Moreover, polynucleotides and polypeptides corresponding to the gene of interest may also be useful for the treatment and diagnosis of hematopoietic related disorders such as, for example, anemia, pancytopenia, leukopenia, thrombocytopenia or leukemia since stromal cells are important in the production of cells of hematopoietic lineages. The uses include bone marrow cell ex-vivo culture, bone marrow transplantation, bone marrow reconstitution, radiotherapy or chemotherapy of neoplasia.

### Example 42

### Human Dermal Fibroblast and Aortic Smooth Muscle Cell Proliferation

[1303] The polypeptide of interest is added to cultures of normal human dermal fibroblasts (NHDF) and human aortic smooth muscle cells (AoSMC) and two co-assays are performed with each sample. The first assay examines the effect of the polypeptide of interest on the proliferation of normal human dermal fibroblasts (NHDF) or aortic smooth muscle cells (AoSMC). Aberrant growth of fibroblasts or smooth muscle cells is a part of several pathological processes, including fibrosis, and restenosis. The second assay examines IL6 production by both NHDF and SMC. IL6 production is an indication of functional activation. Activated cells will have increased production of a number of cytokines and other factors, which can result in a proinflammatory or immunomodulatory outcome. Assays are run with and without co-TNFa stimulation, in order to check for costimulatory or inhibitory activity.

[1304] Briefly, on day 1, 96-well black plates are set up with 1000 cells/well (NHDF) or 2000 cells/well (AoSMC) in 100 μl culture media. NHDF culture media contains: Clonetics FB basal media, 1 mg/ml hFGF, 5 mg/ml insulin, 50 mg/ml gentamycin, 2%FBS, while AoSMC culture media contains Clonetics SM basal media, 0.5 μg/ml hEGF, 5 mg/ml insulin, 1 μg/ml hFGF, 50 mg/ml gentamycin, 50 μg/ml Amphotericin B, 5%FBS. After incubation at 37° C. for at least 4-5 hours culture media is aspirated and replaced with growth arrest media. Growth arrest media for NHDF contains fibroblast basal media, 50 mg/ml gentamycin, 2% FBS, while growth arrest media for AoSMC contains SM basal media, 50 mg/ml gentamycin, 50 μg/ml Amphotericin B, 0.4% FBS. Incubate at 37° C. until day 2.

[1305] On day 2, serial dilutions and templates of the polypeptide of interest are designed such that they always include media controls and known-protein controls. For both stimulation and inhibition experiments, proteins are diluted in growth arrest media. For inhibition experiments, TNFa is added to a final concentration of 2 ng/ml (NHDF) or 5 ng/ml (AoSMC). Add ⅓ vol media containing controls or polypeptides of the present invention and incubate at 37 degrees C./5% CO₂ until day 5.

[1306] Transfer 60 μl from each well to another labeled 96-well plate, cover with a plate-sealer, and store at 4 degrees C. until Day 6 (for IL6 ELISA). To the remaining 100 Ill in the cell culture plate, aseptically add Alamar Blue in an amount equal to 10% of the culture volume (10 μl). Return plates to incubator for 3 to 4 hours. Then measure fluorescence with excitation at 530 nm and emission at 590 nm using the CytoFluor. This yields the growth stimulation/inhibition data.

[1307] On day 5, the IL6 ELISA is performed by coating a 96 well plate with 50-100 ul/well of Anti-Human IL6 Monoclonal antibody diluted in PBS, pH 7.4, incubate ON at room temperature.

[1308] On day 6, empty the plates into the sink and blot on paper towels. Prepare Assay Buffer containing PBS with 4% BSA. Block the plates with 200 μl/well of Pierce Super Block blocking buffer in PBS for 1-2 hr and then wash plates with wash buffer (PBS, 0.05% Tween-20). Blot plates on paper towels. Then add 50 μl/well of diluted Anti-Human IL-6 Monoclonal, Biotin-labeled antibody at 0.50 mg/ml. Make dilutions of IL-6 stock in media (30, 10, 3, 1, 0.3, 0 ng/ml). Add duplicate samples to top row of plate. Cover the plates and incubate for 2 hours at RT on shaker.

[1309] Plates are washed with wash buffer and blotted on paper towels. Dilute EU-labeled Streptavidin 1:1000 in Assay buffer, and add 100 μl/well. Cover the plate and incubate 1 h at RT. Plates are again washed with wash buffer and blotted on paper towels.

[1310] Add 100 μl/well of Enhancement Solution. Shake for 5 minutes. Read the plate on the Wallac DELFIA Fluorometer. Readings from triplicate samples in each assay were tabulated and averaged.

[1311] A positive result in this assay suggests AoSMC cell proliferation and that the polypeptide of the present invention may be involved in dermal fibroblast proliferation and/or smooth muscle cell proliferation. A positive result also suggests many potential uses of polypeptides, polynucleotides, agonists and/or antagonists of the polynucleotide/polypeptide of the present invention which gives a positive result. For example, inflammation and immune responses, wound healing, and angiogenesis, as detailed throughout this specification. Particularly, polypeptides of the present invention and polynucleotides of the present invention may be used in wound healing and dermal regeneration, as well as the promotion of vasculogenesis, both of the blood vessels and lymphatics. The growth of vessels can be used in the treatment of, for example, cardiovascular diseases. Additionally, antagonists of polypeptides and polynucleotides of the invention may be useful in treating diseases, disorders, and/or conditions which involve angiogenesis by acting as an anti-vascular agent (e.g., anti-angiogenesis). These diseases, disorders, and/or conditions are known in the art and/or are described herein, such as, for example, malignancies, solid tumors, benign tumors, for example hemangiomas, acoustic neuromas, neurofibromas, trachomas, and pyogenic granulomas; artheroscleric plaques; ocular angiogenic diseases, for example, diabetic retinopathy, retinopathy of prematurity, macular degeneration, corneal graft rejection, neovascular glaucoma, retrolental fibroplasia, rubeosis, retinoblastoma, uvietis and Pterygia (abnormal blood vessel growth) of the eye; rheumatoid arthritis; psoriasis; delayed wound healing; endometriosis; vasculogenesis; granulations; hypertrophic scars (keloids); nonunion fractures; scleroderma; trachoma; vascular adhesions; myocardial angiogenesis; coronary collaterals; cerebral collaterals; arteriovenous malformations; ischemic limb angiogenesis; Osler-Webber Syndrome; plaque neovascularization; telangiectasia; hemophiliac joints; angiofibroma; fibromuscular dysplasia; wound granulation; Crohn's disease; and atherosclerosis. Moreover, antagonists of polypeptides and polynucleotides of the invention may be useful in treating anti-hyperproliferative diseases and/or anti-inflammatory known in the art and/or described herein.

[1312] One skilled in the art could easily modify the exemplified studies to test the activity of polynucleotides (e.g., gene therapy), antibodies, agonists, and/or antagonists and fragments and variants thereof.

### Example 43

### Cellular Adhesion Molecule (CAM) Expression on Endothelial Cells

[1313] The recruitment of lymphocytes to areas of inflammation and angiogenesis involves specific receptor-ligand interactions between cell surface adhesion molecules (CAMs) on lymphocytes and the vascular endothelium. The adhesion process, in both normal and pathological settings, follows a multi-step cascade that involves intercellular adhesion molecule-1 (ICAM-1), vascular cell adhesion molecule-1 (VCAM-1), and endothelial leukocyte adhesion molecule-1 (E-selectin) expression on endothelial cells (EC). The expression of these molecules and others on the vascular endothelium determines the efficiency with which leukocytes may adhere to the local vasculature and extravasate into the local tissue during the development of an inflammatory response. The local concentration of cytokines and growth factor participate in the modulation of the expression of these CAMs.

[1314] Briefly, endothelial cells (e.g., Human Umbilical Vein Endothelial cells (HUVECs)) are grown in a standard 96 well plate to confluence, growth medium is removed from the cells and replaced with 100 μl of 199 Medium (10% fetal bovine serum (FBS)). Samples for testing and positive or negative controls are added to the plate in triplicate (in 10 μl volumes). Plates are then incubated at 37° C. for either 5 h (selectin and integrin expression) or 24 h (integrin expression only). Plates are aspirated to remove medium and 100 μl of 0.1% paraformaldehyde-PBS(with Ca++and Mg++) is added to each well. Plates are held at 4° C. for 30 min. Fixative is removed from the wells and wells are washed 1× with PBS(+Ca,Mg) +0.5% BSA and drained. 10 μl of diluted primary antibody is added to the test and control wells. Anti-ICAM-1-Biotin, Anti-VCAM-l-Biotin and Anti-E-selectin-Biotin are used at a concentration of 10 μg/ml (1:10 dilution of 0.1 mg/ml stock antibody). Cells are incubated at 37° C. for 30 min. in a humidified environment. Wells are washed three times with PBS(+Ca,Mg) +0.5% BSA. 20 μl of diluted ExtrAvidin-Alkaline Phosphatase (1:5,000 dilution, referred to herein as the working dilution) are added to each well and incubated at 37° C. for 30 min. Wells are washed three times with PBS(+Ca,Mg)+0.5% BSA. Dissolve 1 tablet of p-Nitrophenol Phosphate pNPP per 5 ml of glycine buffer (pH 10.4). 100 μl of pNPP substrate in glycine buffer is added to each test well. Standard wells in triplicate are prepared from the working dilution of the ExtrAvidin-Alkaline Phosphotase in glycine buffer: 1:5,000 (100)>10^{-0.5}>10⁻¹>10^{-0.5}.5 μl of each dilution is added to triplicate wells and the resulting AP content in each well is 5.50 ng, 1.74 ng, 0.55 ng, 0.18 ng. 100 μl of pNNP reagent is then added to each of the standard wells. The plate is incubated at 37° C. for 4 h. A volume of 50 μl of 3M NaOH is added to all wells. The plate is read on a plate reader at 405 nm using the background subtraction option on blank wells filled with glycine buffer only. Additionally, the template is set up to indicate the concentration of AP-conjugate in each standard well [5.50 ng; 1.74 ng; 0.55 ng; 0.18 ng]. Results are indicated as amount of bound AP-conjugate in each sample.

### Example 44

### Alamar Blue Endothelial Cells Proliferation Assay

[1315] This assay may be used to quantitatively determine protein mediated inhibition of bFGF-induced proliferation of Bovine Lymphatic Endothelial Cells (LECs), Bovine Aortic Endothelial Cells (BAECs) or Human Microvascular Uterine Myometrial Cells (UTMECs). This assay incorporates a fluorometric growth indicator based on detection of metabolic activity. A standard Alamar Blue Proliferation Assay is prepared in EGM-2MV with 10 ng/ml of bFGF added as a source of endothelial cell stimulation. This assay may be used with a variety of endothelial cells with slight changes in growth medium and cell concentration. Dilutions of the protein batches to be tested are diluted as appropriate. Serum-free medium (GIBCO SFM) without bFGF is used as a non-stimulated control and Angiostatin or TSP-1 are included as a known inhibitory controls.

[1316] Briefly, LEC, BAECs or UTMECs are seeded in growth media at a density of 5000 to 2000 cells/well in a 96 well plate and placed at 37 degreesC overnight. After the overnight incubation of the cells, the growth media is removed and replaced with GIBCO EC-SFM. The cells are treated with the appropriate dilutions of the protein of interest or control protein sample(s) (prepared in SFM) in triplicate wells with additional bFGF to a concentration of 10 ng/ml. Once the cells have been treated with the samples, the plate(s) is/are placed back in the 37° C. incubator for three days. After three days 10 ml of stock alamar blue (Biosource Cat# DALI 100) is added to each well and the plate(s) is/are placed back in the 37° C. incubator for four hours. The plate(s) are then read at 530 nm excitation and 590 nm emission using the CytoFluor fluorescence reader. Direct output is recorded in relative fluorescence units.

[1317] Alamar blue is an oxidation-reduction indicator that both fluoresces and changes color in response to chemical reduction of growth medium resulting from cell growth. As cells grow in culture, innate metabolic activity results in a chemical reduction of the immediate surrounding environment. Reduction related to growth causes the indicator to change from oxidized (non-fluorescent blue) form to reduced (fluorescent red) form (i.e., stimulated proliferation will produce a stronger signal and inhibited proliferation will produce a weaker signal and the total signal is proportional to the total number of cells as well as their metabolic activity). The background level of activity is observed with the starvation medium alone. This is compared to the output observed from the positive control samples (bFGF in growth medium) and protein dilutions.

### Example 45

### Detection of Inhibition of a Mixed Lymphocyte Reaction

[1318] This assay can be used to detect and evaluate inhibition of a Mixed Lymphocyte Reaction (MLR) by gene products (e.g., isolated polypeptides). Inhibition of a MLR may be due to a direct effect on cell proliferation and viability, modulation of costimulatory molecules on interacting cells, modulation of adhesiveness between lymphocytes and accessory cells, or modulation of cytokine production by accessory cells. Multiple cells may be targeted by these polypeptides since the peripheral blood mononuclear fraction used in this assay includes T, B and natural killer lymphocytes, as well as monocytes and dendritic cells.

[1319] Polypeptides of interest found to inhibit the MLR may find application in diseases associated with lymphocyte and monocyte activation or proliferation. These include, but are not limited to, diseases such as asthma, arthritis, diabetes, inflammatory skin conditions, psoriasis, eczema, systemic lupus erythematosus, multiple sclerosis, glomerulonephritis, inflammatory bowel disease, crohn's disease, ulcerative colitis, arteriosclerosis, cirrhosis, graft vs. host disease, host vs. graft disease, hepatitis, leukemia and lymphoma.

[1320] Briefly, PBMCs from human donors are purified by density gradient centrifugation using Lymphocyte Separation Medium (LSM®, density 1.0770 g/ml, Organon Teknika Corporation, West Chester, Pa.). PBMCs from two donors are adjusted to 2×106 cells/ml in RPMI-1640 (Life Technologies, Grand Island, N.Y.) supplemented with 10% FCS and 2 mM glutamine. PBMCs from a third donor is adjusted to 2×1 cells/ml. Fifty microliters of PBMCs from each donor is added to wells of a 96-well round bottom microtiter plate. Dilutions of test materials (50 μl) is added in triplicate to microtiter wells. Test samples (of the protein of interest) are added for final dilution of 1:4; rhuIL-2 (R&D Systems, Minneapolis, Minn., catalog number 202-IL) is added to a final concentration of 1 μg/ml; anti-CD4 mAb (R&D Systems, clone 34930.11, catalog number MAB379) is added to a final concentration of 10 μg/ml. Cells are cultured for 7-8 days at 37° C. in 5% CO₂, and 1 μC of [³H] thymidine is added to wells for the last 16 hrs of culture. Cells are harvested and thymidine incorporation determined using a Packard TopCount. Data is expressed as the mean and standard deviation of triplicate determinations.

[1321] Samples of the protein of interest are screened in separate experiments and compared to the negative control treatment, anti-CD4 mAb, which inhibits proliferation of lymphocytes and the positive control treatment, IL-2 (either as recombinant material or supernatant), which enhances proliferation of lymphocytes.

[1322] One skilled in the art could easily modify the exemplified studies to test the activity of polynucleotides (e.g., gene therapy), antibodies, agonists, and/or antagonists and fragments and variants thereof

### Example 46

### Assaysfor Protease Activity

[1323] The following assay may be used to assess protease activity of the polypeptides of the invention.

[1324] Gelatin and casein zymography are performed essentially as described (Heusen et al., Anal. Biochem., 102:196-202 (1980); Wilson et al., Journal of Urology, 149:653-658 (1993)). Samples are run on 10% polyacryamide/0.1% SDS gels containing 1% gelain orcasein, soaked in 2.5% triton at room temperature for 1 hour, and in 0.1M glycine, pH 8.3 at 37° C. 5 to 16 hours. After staining in amido black areas of proteolysis apear as clear areas agains the blue-black background. Trypsin (Sigma T8642) is used as a positive control.

[1325] Protease activity is also determined by monitoring the cleavage of n-a-benzoyl-L-arginine ethyl ester (BAEE) (Sigma B-4500. Reactions are set up in (25 mMNaPO₄,1 mM EDTA, and 1 mM BAEE), pH 7.5. Samples are added and the change in adsorbance at 260 nm is monitored on the Beckman DU-6 spectrophotometer in the time-drive mode. Trypsin is used as a positive control.

[1326] Additional assays based upon the release of acid-soluble peptides from casein or hemoglobin measured as adsorbance at 280 nm or colorimetrically using the Folin method are performed as described in Bergmeyer, et al., Methods of Enzymatic Analysis, 5 (1984). Other assays involve the solubilization of chromogenic substrates (Ward, Applied Science, 251-317 (1983)).

### Example 47

### Identifying Serine Protease Substrate Specificity

[1327] Methods known in the art or described herein may be used to determine the substrate specificity of the polypeptides of the present invention having serine protease activity. A preferred method of determining substrate specificity is by the use of positional scanning synthetic combinatorial libraries as described in GB 2 324 529 (incorporated herein in its entirety).

### Example 48

### Ligand Binding Assays

[1328] The following assay may be used to assess ligand binding activity of the polypeptides of the invention.

[1329] Ligand binding assays provide a direct method for ascertaining receptor pharmacology and are adaptable to a high throughput format. The purified ligand for a polypeptide is radiolabeled to high specific activity (50-2000 Ci/mmol) for binding studies. A determination is then made that the process of radiolabeling does not diminish the activity of the ligand towards its polypeptide. Assay conditions for buffers, ions, pH and other modulators such as nucleotides are optimized to establish a workable signal to noise ratio for both membrane and whole cell polypeptide sources. For these assays, specific polypeptide binding is defined as total associated radioactivity minus the radioactivity measured in the presence of an excess of unlabeled competing ligand. Where possible, more than one competing ligand is used to define residual nonspecific binding.

### Example 49

### Functional Assay in Xenopus Oocytes

[1330] Capped RNA transcripts from linearized plasmid templates encoding the polypeptides of the invention are synthesized in vitro with RNA polymerases in accordance with standard procedures. In vitro transcripts are suspended in water at a final concentration of 0.2 mg/mi. Ovarian lobes are removed from adult female toads, Stage V defolliculated oocytes are obtained, and RNA transcripts (10 ng/oocytc) are injected in a 50 nl bolus using a microinjection apparatus. Two electrode voltage clamps are used to measure the currents from individual Xenopus oocytes in response polypeptides and polypeptide agonist exposure. Recordings are made in Ca2+ free Barth's medium at room temperature. The Xenopus system can be used to screen known ligands and tissue/cell extracts for activating ligands.

### Example 50

### Microphysiometric Assays

[1331] Activation of a wide variety of secondary messenger systems results in extrusion of small amounts of acid from a cell. The acid formed is largely as a result of the increased metabolic activity required to fuel the intracellular signaling process. The pH changes in the media surrounding the cell are very small but are detectable by the CYTOSENSOR microphysiometer (Molecular Devices Ltd., Menlo Park, Calif.). The CYTOSENSOR is thus capable of detecting the activation of polypeptide which is coupled to an energy utilizing intracellular signaling pathway.

### Example 51

### Extract/Cell Supernatant Screening

[1332] A large number of mammalian receptors exist for which there remains, as yet, no cognate activating ligand (agonist). Thus, active ligands for these receptors may not be included within the ligands banks as identified to date. Accordingly, the polypeptides of the invention can also be functionally screened (using calcium, cAMP, microphysiometer, oocyte electrophysiology, etc., functional screens) against tissue extracts to identify its natural ligands. Extracts that produce positive functional responses can be sequentially subfractionated until an activating ligand is isolated and identified.

### Example 52

### Calcium and cAMP Functional Assays

[1333] Seven transmembrane receptors which are expressed in HEK 293 cells have been shown to be coupled functionally to activation of PLC and calcium mobilization and/or cAMP stimulation or inhibition. Basal calcium levels in the HEK 293 cells in receptor-transfected or vector control cells were observed to be in the normal, 100 nM to 200 nM, range. HEK 293 cells expressing recombinant receptors are loaded with fura 2 and in a single day >150 selected ligands or tissue/cell extracts are evaluated for agonist-induced calcium mobilization. Similarly, HEK 293 cells expressing recombinant receptors are evaluated for the stimulation or inhibition of cAMP production using standard cAMP quantitation assays. Agonists presenting a calcium transient or cAMP fluctuation are tested in vector control cells to determine if the response is unique to the transfected cells expressing receptor.

### Example 53

### A TP-binding assay

[1334] The following assay may be used to assess ATP-binding activity of polypeptides of the invention.

[1335] ATP-binding activity of the polypeptides of the invention may be detected using the ATP-binding assay described in U.S. Pat. No. 5,858,719, which is herein incorporated by reference in its entirety. Briefly, ATP-binding to polypeptides of the invention is measured via photoaffinity labeling with 8-azido-ATP in a competition assay. Reaction mixtures containing 1 mg/ml of the ABC transport protein of the present invention are incubated with varying concentrations of ATP, or the non-hydrolyzable ATP analog adenyl-5′-imidodiphosphate for 10 minutes at 4° C. A mixture of 8-azido-ATP (Sigma Chem. Corp., St. Louis, Mo.) plus 8-azido-ATP (³²P-ATP) (5 mCi/μmol, ICN, Irvine Calif.) is added to a final concentration of 100 μM and 0.5 ml aliquots are placed in the wells of a porcelain spot plate on ice. The plate is irradiated using a short wave 254 nm UV lamp at a distance of 2.5 cm from the plate for two one-minute intervals with a one-minute cooling interval in between. The reaction is stopped by addition of dithiothreitol to a final concentration of 2 mM. The incubations are subjected to SDS-PAGE electrophoresis, dried, and autoradiographed. Protein bands corresponding to the particular polypeptides of the invention are excised, and the radioactivity quantified. A decrease in radioactivity with increasing ATP or adenly-5′-imidodiphosphate provides a measure of ATP affinity to the polypeptides.

### Example 54

### Small Molecule Screening

[1336] This invention is particularly useful for screening therapeutic compounds by using the polyp eptides of the invention, or binding fragments thereof, in any of a variety of drug screening techniques. The polypeptide or fragment employed in such a test may be affixed to a solid support, expressed on a cell surface, free in solution, or located intracellularly. One method of drug screening utilizes eukaryotic or prokaryotic host cells which are stably transformed with recombinant nucleic acids expressing the polypeptide or fragment. Drugs are screened against such transformed cells in competitive binding assays. One may measure, for example, the formulation of complexes between the agent being tested and polypeptide of the invention.

[1337] Thus, the present invention provides methods of screening for drugs or any other agents which affect activities mediated by the polypeptides of the invention. These methods comprise contacting such an agent with a polypeptide of the invention or fragment thereof and assaying for the presence of a complex between the agent and the polypeptide or fragment thereof, by methods well known in the art. In such a competitive binding assay, the agents to screen are typically labeled. Following incubation, free agent is separated from that present in bound form, and the amount of free or uncomplexed label is a measure of the ability of a particular agent to bind to the polypeptides of the invention.

[1338] Another technique for drug screening provides high throughput screening for compounds having suitable binding affinity to the polypeptides of the invention, and is described in great detail in European Patent Application 84/03564, published on Sep. 13, 1984, which is herein incorporated by reference in its entirety. Briefly stated, large numbers of different small molecule test compounds are synthesized on a solid substrate, such as plastic pins or some other surface. The test compounds are reacted with polypeptides of the invention and washed. Bound polypeptides are then detected by methods well known in the art. Purified polypeptides are coated directly onto plates for use in the aforementioned drug screening techniques. In addition, non-neutralizing antibodies may be used to capture the peptide and immobilize it on the solid support.

[1339] This invention also contemplates the use of competitive drug screening assays in which neutralizing antibodies capable of binding polypeptides of the invention specifically compete with a test compound for binding to the polypeptides or fragments thereof. In this manner, the antibodies are used to detect the presence of any peptide which shares one or more antigenic epitopes with a polypeptide of the invention.

### Example 55

### Phosphorylation Assay

[1340] In order to assay for phosphorylation activity of the polypeptides of the invention, a phosphorylation assay as described in U.S. Pat. No. 5,958,405 (which is herein incorporated by reference) is utilized. Briefly, phosphorylation activity may be measured by phosphorylation of a protein substrate using gamma-labeled ³²P-ATP and quantitation of the incorporated radioactivity using a gamma radioisotope counter. The polypeptides of the invention are incubated with the protein substrate, 32P-ATP, and a kinase buffer. The ³²P incorporated into the substrate is then separated from free ³²P-ATP by electrophoresis, and the incorporated ³²P is counted and compared to a negative control. Radioactivity counts above the negative control are indicative of phosphorylation activity of the polypeptides of the invention.

### Example 56

### Detection ofPhosphorylation Activity (Activation) of the Polypeptides of the Invention in the Presence of Polypeptide Ligands

[1341] Methods known in the art or described herein may be used to determine the phosphorylation activity of the polypeptides of the invention. A preferred method of determining phosphorylation activity is by the use of the tyrosine phosphorylation assay as described in U.S. Pat. No. 5,817,471 (incorporated herein by reference).

### Example 57

### Identification of Signal Transduction Proteins that Interact with Polypeptides of the Present Invention

[1342] The purified polypeptides of the invention are research tools for the identification, characterization and purification of additional signal transduction pathway proteins or receptor proteins. Briefly, labeled polypeptides of the invention are useful as reagents for the purification of molecules with which it interacts. In one embodiment of affinity purification, polypeptides of the invention are covalently coupled to a chromatography column. Cell-free extract derived from putative target cells, such as carcinoma tissues, is passed over the column, and molecules with appropriate affinity bind to the polypeptides of the invention. The protein complex is recovered from the column, dissociated, and the recovered molecule subjected to N-terminal protein sequencing. This amino acid sequence is then used to identify the captured molecule or to design degenerate oligonucleotide probes for cloning the relevant gene from an appropriate cDNA library.

### Example 58

### IL-6 Bioassay

[1343] To test the proliferative effects of the polypeptides of the invention, the IL-6 Bioassay as described by Marz et al. is utilized (Proc. Natl. Acad. Sci., U.S.A., 95:3251-56 (1998), which is herein incorporated by reference). Briefly, IL-6 dependent B9 murine cells are washed three times in IL-6 free medium and plated at a concentration of 5,000 cells per well in 50 μl, and 50 μl of the IL-6-like polypeptide is added. After 68 hrs. at 37° C., the number of viable cells is measured by adding the tetrazolium salt thiazolyl blue (MTT) and incubating for a further 4 hrs. at 37° C. B9 cells are lysed by SDS and optical density is measured at 570 nm. Controls containing IL-6 (positive) and no cytokine (negative) are utilized. Enhanced proliferation in the test sample(s) relative to the negative control is indicative of proliferative effects mediated by polypeptides of the invention.

### Example 59

### Support of Chicken Embryo Neuron Survival

[1344] To test whether sympathetic neuronal cell viability is supported by polypeptides of the invention, the chicken embryo neuronal survival assay of Senaldi et al is utilized (Proc. Natl. Acad. Sci., U.S.A., 96:11458-63 (1998), which is herein incorporated by reference). Briefly, motor and sympathetic neurons are isolated from chicken embryos, resuspended in L15 medium (with 10% FCS, glucose, sodium selenite, progesterone, conalbumin, putrescine, and insulin; Life Technologies, Rockville, MD.) and Dulbecco's modified Eagles medium [with 10% FCS, glutamine, penicillin, and 25 mM Hepes buffer (pH 7.2); Life Technologies, Rockville, MD.], respectively, and incubated at 37° C. in 5% CO₂ in the presence of different concentrations of the purified IL-6-like polypeptide, as well as a negative control lacking any cytokine. After 3 days, neuron survival is determined by evaluation of cellular morphology, and through the use of the colorimetric assay of Mosmann (Mosmann, T., J. Immunol. Methods, 65:55-63 (1983)). Enhanced neuronal cell viability as compared to the controls lacking cytokine is indicative of the ability of the inventive purified IL-6-like polypeptide(s) to enhance the survival of neuronal cells.

### Example 60

### Assay for Phosphatase Activity

[1345] The following assay may be used to assess serine/threonine phosphatase (PTPase) activity of the polypeptides of the invention.

[1346] In order to assay for serine/threonine phosphatase (PTPase) activity, assays can be utilized which are widely known to those skilled in the art. For example, the serine/threonine phosphatase (PSPase) activity is measured using a PSPase assay kit from New England Biolabs, Inc. Myelin basic protein (MyBP), a substrate for PSPase, is phosphorylated on serine and threonine residues with cAMP-dependent Protein Kinase in the presence of [32P]ATP. Protein serine/threonine phosphatase activity is then determined by measuring the release of inorganic phosphate from 32P-labeled MyBP.

### Example 61

### Interaction of Serine/Threonine Phosphatases with other Proteins

[1347] The polypeptides of the invention with serine/threonine phosphatase activity as determined in Example 60 are research tools for the identification, characterization and purification of additional interacting proteins or receptor proteins, or other signal transduction pathway proteins. Briefly, labeled polypeptide(s) of the invention is useful as a reagent for the purification of molecules with which it interacts. In one embodiment of affinity purification, polypeptide of the invention is covalently coupled to a chromatography column. Cell-free extract derived from putative target cells, such as neural or liver cells, is passed over the column, and molecules with appropriate affinity bind to the polypeptides of the invention. The polypeptides of the invention -complex is recovered from the column, dissociated, and the recovered molecule subjected to N-terminal protein sequencing. This amino acid sequence is then used to identify the captured molecule or to design degenerate oligonucleotide probes for cloning the relevant gene from an appropriate cDNA library.

### Example 62

### Assaying for Heparanase Activity

[1348] In order to assay for heparanase activity of the polypeptides of the invention, the heparanase assay described by Vlodavsky et al is utilized (Vlodavsky, I., et al., Nat. Med., 5:793-802 (1999)). Briefly, cell lysates, conditioned media or intact cells (1×10⁶ cells per 35-mm dish) are incubated for 18 hrs at 37° C., pH 6.2-6.6, with ³⁵S-labeled ECM or soluble ECM derived peak I proteoglycans. The incubation medium is centrifuged and the supernatant is analyzed by gel filtration on a Sepharose CL-6B column (0.9×30 cm). Fractions are eluted with PBS and their radioactivity is measured. Degradation fragments of heparan sulfate side chains are eluted from Sepharose 6B at 0.5 <Kₐᵥ<0.8 (peak II). Each experiment is done at least three times. Degradation fragments corresponding to “peak II,” as described by Vlodavsky et al., is indicative of the activity of the polypeptides of the invention in cleaving heparan sulfate.

### Example 63

### Immobilization of biomolecules

[1349] This example provides a method for the stabilization of polypeptides of the invention in non-host cell lipid bilayer constucts (see, e.g., Bieri et al., Nature Biotech 17:1105-1108 (1999), hereby incorporated by reference in its entirety herein) which can be adapted for the study of polypeptides of the invention in the various functional assays described above. Briefly, carbohydrate-specific chemistry for biotinylation is used to confine a biotin tag to the extracellular domain of the polypeptides of the invention, thus allowing uniform orientation upon immobilization. A 5OuM solution of polypeptides of the invention in washed membranes is incubated with 20 mM NaIO4 and 1.5 mg/ml (4 mM) BACH or 2 mg/ml (7.5 mM) biotin-hydrazide for 1 hr at room temperature (reaction volume, 150 ul). Then the sample is dialyzed (Pierce Slidealizer Cassett, 10 kDa cutoff; Pierce Chemical Co., Rockford Ill.) at 4C first for 5 h, exchanging the buffer after each hour, and finally for 12 h against 500 ml buffer R (0.15 M NaCl, 1 mM MgCl₂, 10 mM sodium phosphate, pH7). Just before addition into a cuvette, the sample is diluted 1:5 in buffer ROG50 (Buffer R supplemented with 50 mM octylglucoside).

### Example 64

### TAQMAN

[1350] Quantitative PCR (QPCR). Total RNA from cells in culture are extracted by Trizol separation as recommended by the supplier (LifeTechnologies). (Total RNA is treated with DNase I (Life Technologies) to remove a ny contaminating genomic DNA before reverse transcription.) Total RNA (50 ng) is used in a one-step, 50 ul, RT-QPCR, consisting of Taqman Buffer A (Perkin-Elmer; 50 mM KCl/10 mM Tris, pH 8.3), 5.5 mM MgCl₂, 240 μM each dNTP, 0.4 units RNase inhibitor(Promega), 8%glycerol, 0.012% Tween-20, 0.05% gelatin, 0.3 uM primers, 0.1 uM probe, 0.025 units Amplitaq Gold (Perkin-Elmer) and 2.5 units Superscript II reverse transcriptase (Life Technologies). As a control for genomic contamination, parallel reactions are setup without reverse transcriptase. The relative abundance of (unknown) and 18S RNAs are assessed by using the Applied Biosystems Prism 7700 Sequence Detection System (Livak, K. J., Flood, S. J., Marmaro, J., Giusti, W. & Deetz, K. (1995) PCR Methods Appl. 4, 357-362). Reactions are carried out at 48° C. for 30 min, 95° C. for 10 min, followed by 40 cycles of 95° C. for 15s, 60° C. for 1 min. Reactions are performed in triplicate.

[1351] Primers (f & r) and FRET probes sets are designed using Primer Express Software (Perkin-Elmer). Probes are labeled at the 5′-end with the reporter dye 6-FAM and on the 3′-end with the quencher dye TAMRA (Biosource International, Camarillo, CA or Perkin-Elmer).

### Example 65

### Assays for Metalloproteinase Activity

[1352] Metalloproteinases (EC 3.4.24.-) are peptide hydrolases which use metal ions, such as Zn²⁺, as the catalytic mechanism. Metalloproteinase activity of polypeptides of the present invention can be assayed according to the following methods.

[1353] Proteolysis of Alpha-2-macroglobulin

[1354] To confirm protease activity, purified polypeptides of the invention are mixed with the substrate alpha-2-macroglobulin (0.2 unit/ml; Boehringer Mannheim, Germany) in 1× assay buffer (50 mM HEPES, pH 7.5, 0.2 M NaCl, 10 mM CaCI₂, 25 μM ZnCl₂ and 0.05% Brij-35) and incubated at 37° C. for 1-5 days. Trypsin is used as positive control. Negative controls contain only alpha-2-macroglobulin in assay buffer. The samples are collected and boiled in SDS-PAGE sample buffer containing 5% 2-mercaptoethanol for 5-min, then loaded onto 8% SDS-polyacrylamide gel. After electrophoresis the proteins are visualized by silver staining. Proteolysis is evident by the appearance of lower molecular weight bands as compared to the negative control.

[1355] Inhibition of Alpha-2-macroglobulin Proteolysis by Inhibitors of Metalloproteinases

[1356] Known metalloproteinase inhibitors (metal chelators (EDTA, EGTA, AND HgCl₂), peptide metalloproteinase inhibitors (TIMP-1 and TIMP-2), and commercial small molecule MMP inhibitors) are used to characterize the proteolytic activity of polypeptides of the invention. The three synthetic MMP inhibitors used are: MMP inhibitor I, [IC₅₀=1.0 μM against MMP-1 and MMP-8; IC₅₀=30 μM against MMP-9; IC₅₀=150 μM against MMP-3]; MMP-3 (stromelysin-1) inhibitor I [IC₅₀=5 μM against MMP-3], and MMP-3 inhibitor II [Kᵢ=130 nM against MMP-3]; inhibitors available through Calbiochem, catalog # 444250, 444218, and 444225, respectively). Briefly, different concentrations of the small molecule MMP inhibitors are mixed with purified polypeptides of the invention (50 μg/ml) in 22.9 μl of lx HEPES buffer (50 mM HEPES, pH 7.5, 0.2 M NaCi, 10 mM CaCl₂, 25 μM ZnCI₂ and 0.05%Brij-35) and incubated at room temperature (24° C.) for 2-hr, then 7.1 μl of substrate alpha-2-macroglobulin (0.2 unit/ml) is added and incubated at 37° C. for 20-hr. The reactions are stopped by adding 4x sample buffer and boiled immediately for 5 minutes. After SDS-PAGE, the protein bands are visualized by silver stain.

[1357] Synthetic Fluorogenic Peptide Substrates Cleavage Assay

[1358] The substrate specificity for polypeptides of the invention with demonstrated metalloproteinase activity can be determined using synthetic fluorogenic peptide substrates (purchased from BACHEM Bioscience Inc). Test substrates include, M-1985, M-2225, M-2105, M-21 10, and M-2255. The first four are MMP substrates and the last one is a substrate of tumor necrosis factor-α (TNF-α) converting enzyme (TACE). All the substrates are prepared in 1:1 dimethyl sulfoxide (DMSO) and water. The stock solutions are 50-500 μM. Fluorescent assays are performed by using a Perkin Elmer LS 50B luminescence spectrometer equipped with a constant temperature water bath. The excitation λ is 328 nm and the emission λ is 393 nm. Briefly, the assay is carried out by incubating 176 μl 1× HEPES buffer (0.2 M NaCl, 10 mM CaCl₂, 0.05% Brij-35 and 50 mM HEPES, pH 7.5) with 4 μl of substrate solution (50 μM) at 25° C. for 15 minutes, and then adding 20 μl of a purified polypeptide of the invention into the assay cuvett. The final concentration of substrate is 1 μM. Initial hydrolysis rates are monitored for 30-min.

### Example 66

### Characterization of the cDNA Contained in a Deposited Plasmid

[1359] The size of the cDNA insert contained in a deposited plasmid may be routinely determined using techniques known in the art, such as PCR amplification using synthetic primers hybridizable to the 3′ and 5′ ends of the cDNA sequence. For example, two primers of 17-30 nucleotides derived from each end of the cDNA (i.e., hybridizable to the absolute 5′ nucleotide or the 3′ nucleotide end of the sequence of SEQ ID NO:X, respectively) are synthesized and used to amplify the cDNA using the deposited cDNA plasmid as a template. The polymerase chain reaction is carried out under routine conditions, for instance, in 25 ul of reaction mixture with 0.5 ug of the above cDNA template. A convenient reaction mixture is 1.5-5 mM MgCI₂, 0.01% (w/v) gelatin, 20 uM each of dATP, dCTP, dGTP, dTTP, 25 pmol of each primer and 0.25 Unit of Taq polymerase. Thirty five cycles of PCR (denaturation at 94 degree C. for 1 min; annealing at 55 degree C. for 1 min; elongation at 72 degree C. for I min) are performed with a Perkin-Elmer Cetus automated thermal cycler. The amplified product is analyzed by agarose gel electrophoresis. The PCR product is verified to be the selected sequence by subcloning and sequencing the DNA product.

[1360] Use of the above methodologies and/or other methodologies known in the art generates fragments from the clone corresponding to the approximate fragments described in Table 8, below. Accordingly, Table 8 provides a physical characterization of certain clones encompassed by the invention. The first column provides the unique clone identifier, “Clone ID NO:Z”, for cDNA clones of the invention, as described in Table 1A. The second column provides the approximate size of the cDNA insert contained in the corresponding cDNA clone.

TABLE 8

| | cDNA |
|---|---|
| Clone ID | Insert |
| NO:Z | Size: |
| H7TBC95 | 700 |
| HACCH94 | 1400 |
| HELFN75 | 700 |
| HELGD12 | 1000 |
| HELGW31 | 1700 |
| HFRBN81 | 3000 |
| HHSAD81 | 1800 |
| HMAIA55 | 1100 |
| HNFCS26 | 1700 |
| HNGFK28 | 900 |
| HPWCJ63 | 1500 |
| HSDGH48 | 1100 |
| HSDIW73 | 1600 |
| HSDJX58 | 1500 |
| HSLCF96 | 1600 |
| HSLFF79 | 900 |
| HTXGF27 | 1300 |
| HTXPS22 | 1600 |

[1361] It will be clear that the invention may be practiced otherwise than as particularly described in the foregoing description and examples. Numerous modifications and variations of the present invention are possible in light of the above teachings and, therefore, are within the scope of the appended claims.

[1362] The entire disclosure of each document cited (including patents, patent applications, journal articles, abstracts, laboratory manuals, books, or other disclosures) in the Background of the Invention, Detailed Description, and Examples is hereby incorporated herein by reference. In addition, the paper copy of the sequence listing submitted herewith and the corresponding computer readable form are both incorporated herein by reference in their entireties. The specification and sequence listing of each of the following U.S. applications are herein incorporated by reference in their entirety: Application No. 60/179,065, filed on Jan. 31, 2000; Application No. 60/180,628, filed on Feb. 4, 2000; Application No. 60/205,515, filed on May. 19, 2000; Application No. 60/225,447, filed on Aug. 14, 2000; Application No. 60/218,290, filed on Jul. 14, 2000; Application No. 60/216,880, filed on Jul. 7, 2000; Application No. 60/234,997, filed on Sep. 25, 2000; Application No. 60/229,343, filed on Sep. 1, 2000; Application No. 60/236,367, filed on Sep. 29, 2000; Application No. 60/239,937, filed on Oct. 13, 2000; Application No. 60/249,210, filed on Nov. 17, 2000; Application No. 60/249,211, filed on Nov. 17, 2000; Application No. 60/249,214, filed on Nov. 17, 2000; Application No. 60/231,243, filed on Sep. 8, 2000; Application No. 60/246,477, filed on Nov. 8, 2000; Application No. 60/246,528, filed on Nov. 8, 2000; Application No. 60/246,525, filed on Nov. 8, 2000; Application No. 60/246,476, filed on Nov. 8, 2000; Application No. 60/246,526, filed on Nov. 8, 2000; Application No. 60/249,265, filed on Nov. 17, 2000; Application No. 60/230,437 filed on Sep. 6, 2000; Application No. 60/251,990, filed on Dec. 8, 2000; Application No. 60/251,988, filed on Dec. 5, 2000; Application No. 60/251,030, filed on Dec. 5, 2000; Application No. 60/251,479, filed on Dec. 6, 2000; Application No. 60/256,719, filed on Dec. 5, 2000; Application No. 60/250,160, filed on Dec. 1, 2000; Application No. 60/251,989, filed on Dec. 8, 2000; Application No. 60/250,391, filed on Dec. 1, 2000; Application No. 60/254,097, filed on Dec. 11, 2000; and International Application No. PCT/US01/01346, filed Jan. 17, 2001.

[1363] Moreover, the microfiche copy and the corresponding computer readable form of the Sequence Listing of U.S. Application Ser. No. 60/179,065, and the hard copy of and the corresponding computer readable form of the Sequence Listing of U.S. Application Ser. Nos. 60/180,628 and 60/205,515 are also incorporated herein by reference in their entireties.

What is claimed is:

1. An isolated nucleic acid molecule comprising a polynucleotide having a nucleotide sequence at least 95% identical to a sequence selected from the group consisting of:
(a) a polynucleotide fragment of SEQ ID NO:X or a polynucleotide fragment of the cDNA sequence contained in Clone ID NO:Z, which is hybridizable to SEQ ID NO:X;
(b) a polynucleotide encoding a polypeptide fragment of SEQ ID NO:Y or a polypeptide fragment encoded by the cDNA sequence contained in cDNA Clone ID NO:Z, which is hybridizable to SEQ ID NO:X;
(c) a polynucleotide encoding a polypeptide fragment of a polypeptide encoded by SEQ ID NO:X or a polypeptide fragment encoded by the cDNA sequence contained in cDNA Clone ID NO:Z, which is hybridizable to SEQ ID NO:X;
(d) a polynucleotide encoding a polypeptide domain of SEQ ID NO:Y or a polypeptide domain encoded by the cDNA sequence contained in cDNA Clone ID NO:Z, which is hybridizable to SEQ ID NO:X;
(e) a polynucleotide encoding a polypeptide epitope of SEQ ID NO:Y or a polypeptide epitope encoded by the cDNA sequence contained in cDNA Clone ID NO:Z, which is hybridizable to SEQ ID NO:X;
(f) a polynucleotide encoding a polypeptide of SEQ ID NO:Y or the cDNA sequence contained in cDNA Clone ID NO:Z, which is hybridizable to SEQ ID NO:X, having biological activity;
(g) a polynucleotide which is a variant of SEQ ID NO:X;
(h) a polynucleotide which is an allelic variant of SEQ ID NO:X;
(i) a polynucleotide which encodes a species homologue of the SEQ ID NO:Y;
(j) a polynucleotide capable of hybridizing under stringent conditions to any one of the polynucleotides specified in (a)-(i), wherein said polynucleotide does not hybridize under stringent conditions to a nucleic acid molecule having a nucleotide sequence of only A residues or of only T residues.

2. The isolated nucleic acid molecule of claim 1, wherein the polynucleotide fragment comprises a nucleotide sequence encoding a protein.

3. The isolated nucleic acid molecule of claim 1, wherein the polynucleotide fragment comprises a nucleotide sequence encoding the sequence identified as SEQ ID NO:Y or the polypeptide encoded by the cDNA sequence contained in cDNA Clone ID NO:Z, which is hybridizable to SEQ ID NO:X.

4. The isolated nucleic acid molecule of claim 1, wherein the polynucleotide fragment comprises the entire nucleotide sequence of SEQ ID NO:X or the cDNA sequence contained in cDNA Clone ID NO:Z, which is hybridizable to SEQ ID NO:X.

5. The isolated nucleic acid molecule of claim 2, wherein the nucleotide sequence comprises sequential nucleotide deletions from either the C-terminus or the N-terminus.

6. The isolated nucleic acid molecule of claim 3, wherein the nucleotide sequence comprises sequential nucleotide deletions from either the C-terminus or the N-terminus.

7. A recombinant vector comprising the isolated nucleic acid molecule of claim 1.

8. A method of making a recombinant host cell comprising the isolated nucleic acid molecule of claim 1.

9. A recombinant host cell produced by the method of claim 8.

10. The recombinant host cell of claim 9 comprising vector sequences.

11. An isolated polypeptide comprising an amino acid sequence at least 90% identical to a sequence selected from the group consisting of:
(a) a polypeptide fragment of SEQ ID NO:Y or the encoded sequence contained in cDNA Clone ID NO:Z;
(b) a polypeptide fragment of SEQ ID NO:Y or the encoded sequence contained in cDNA Clone ID NO:Z, having biological activity;
(c) a polypeptide domain of SEQ ID NO:Y or the encoded sequence contained in cDNA Clone ID NO:Z;
(d) a polypeptide epitope of SEQ ID NO:Y or the encoded sequence contained in cDNA Clone ID NO:Z;
(e) a full length protein of SEQ ID NO:Y or the encoded sequence contained in cDNA Clone ID NO:Z;
(f) a variant of SEQ ID NO:Y;
(g) an allelic variant of SEQ ID NO:Y; or
(h) a species homologue of the SEQ ID NO:Y.

12. The isolated polypeptide of claim 11, wherein the full length protein comprises sequential amino acid deletions from either the C-terminus or the N-terminus.

13. An isolated antibody that binds specifically to the isolated polypeptide of claim 11.

14. A recombinant host cell that expresses the isolated polypeptide of claim 11.

15. A method of making an isolated polypeptide comprising:
(a) culturing the recombinant host cell of claim 14 under conditions such that said polypeptide is expressed; and
(b) recovering said polypeptide.

16. The polypeptide produced by claim 15.

17. A method for preventing, treating, or ameliorating a medical condition, comprising administering to a mammalian subject a therapeutically effective amount of the polynucleotide of claim 1.

18. A method of diagnosing a pathological condition or a susceptibility to a pathological condition in a subject comprising:
(a) determining the presence or absence of a mutation in the polynucleotide of claim 1; and
(b) diagnosing a pathological condition or a susceptibility to a pathological condition based on the presence or absence of said mutation.

19. A method of diagnosing a pathological condition or a susceptibility to a pathological condition in a subject comprising:
(a) determining the presence or amount of expression of the polypeptide of claim 11 in a biological sample; and
(b) diagnosing a pathological condition or a susceptibility to a pathological condition based on the presence or amount of expression of the polypeptide.

20. A method for identifying a binding partner to the polypeptide of claim 11 comprising:
(a) contacting the polypeptide of claim 11 with a binding partner; and
(b) determining whether the binding partner effects an activity of the polypeptide.

21. The gene corresponding to the cDNA sequence of SEQ ID NO:Y.

22. A method of identifying an activity in a biological assay, wherein the method comprises:
(a) expressing SEQ ID NO:X in a cell;
(b) isolating the supernatant;
(c) detecting an activity in a biological assay; and
(d) identifying the protein in the supernatant having the activity.

23. The product produced by the method of claim 20.

24. A method for preventing, treating, or ameliorating a medical condition, comprising administering to a mammalian subject a therapeutically effective amount of the polypeptide of claim 11.

The application's sequence listing, which the Patent Office published only in electronic form, follows.

SEQUENCE LISTING (289 sequences)

SEQ ID NO: 1 - DNA, 733 bp, Homo sapiens
gggatccggagcccaaatcttctgacaaaactcacacatgcccaccgtgcccagcacctgaattcgagggtgcaccgtcagtcttcctcttccccccaaaacccaaggacaccctcatgatctcccggactcctgaggtcacatgcgtggtggtggacgtaagccacgaagaccctgaggtcaagttcaactggtacgtggacggcgtggaggtgcataatgccaagacaaagccgcgggaggagcagtacaacagcacgtaccgtgtggtcagcgtcctcaccgtcctgcaccaggactggctgaatggcaaggagtacaagtgcaaggtctccaacaaagccctcccaacccccatcgagaaaaccatctccaaagccaaagggcagccccgagaaccacaggtgtacaccctgcccccatcccgggatgagctgaccaagaaccaggtcagcctgacctgcctggtcaaaggcttctatccaagcgacatcgccgtggagtgggagagcaatgggcagccggagaacaactacaagaccacgcctcccgtgctggactccgacggctccttcttcctctacagcaagctcaccgtggacaagagcaggtggcagcaggggaacgtcttctcatgctccgtgatgcatgaggctctgcacaaccactacacgcagaagagcctctccctgtctccgggtaaatgagtgcgacggccgcgactctagaggat

SEQ ID NO: 2 - protein, 5 aa, Homo sapiens
  Site (3): Xaa equals any of the twenty naturally ocurring L-amino acids
WSXWS

SEQ ID NO: 3 - DNA, 86 bp, Artificial Sequence
  Primer_Bind: Synthetic sequence with 4 tandem copies of the GAS binding site found in the IRF1 promoter (Rothman et al., Immunity 1:457-468 (1994)), 18 nucleotides complementary to the SV40 early promoter, and a Xho I restriction site.
gcgcctcgagatttccccgaaatctagatttccccgaaatgatttccccgaaatgatttccccgaaatatctgccatctcaattag

SEQ ID NO: 4 - DNA, 27 bp, Artificial Sequence
  Primer_Bind: Synthetic sequence complementary to the SV40 promoter; includes a Hind III restriction site.
gcggcaagctttttgcaaagcctaggc

SEQ ID NO: 5 - DNA, 271 bp, Artificial Sequence
  Protein_Bind: Synthetic promoter for use in biological assays; includes GAS binding sites found in the IRF1 promoter (Rothman et al., Immunity 1:457-468 (1994)).
ctcgagatttccccgaaatctagatttccccgaaatgatttccccgaaatgatttccccgaaatatctgccatctcaattagtcagcaaccatagtcccgcccctaactccgcccatcccgcccctaactccgcccagttccgcccattctccgccccatggctgactaattttttttatttatgcagaggccgaggccgcctcggcctctgagctattccagaagtagtgaggaggcttttttggaggcctaggcttttgcaaaaagctt

SEQ ID NO: 6 - DNA, 32 bp, Artificial Sequence
  Primer_Bind: Synthetic primer complementary to human genomic EGR-1 promoter sequence (Sakamoto et al., Oncogene 6:867-871 (1991)); includes a Xho I restriction site.
gcgctcgagggatgacagcgatagaaccccgg

SEQ ID NO: 7 - DNA, 31 bp, Artificial Sequence
  Primer_Bind: Synthetic primer complementary to human genomic EGR-1 promoter sequence (Sakamoto et al., Oncogene 6:867-871 (1991)); includes a Hind III restriction site.
gcgaagcttcgcgactccccggatccgcctc

SEQ ID NO: 8 - DNA, 12 bp, Homo sapiens
ggggactttccc

SEQ ID NO: 9 - DNA, 73 bp, Artificial Sequence
  Primer_Bind: Synthetic primer with 4 tandem copies of the NF-KB binding site (GGGGACTTTCCC), 18 nucleotides complementary to the 5' end of the SV40 early promoter sequence, and a XhoI restriction site.
gcggcctcgaggggactttcccggggactttccggggactttccgggactttccatcctgccatctcaattag

SEQ ID NO: 10 - DNA, 256 bp, Artificial Sequence
  Protein_Bind: Synthetic promoter for use in biological assays; includes NF-KB binding sites.
ctcgaggggactttcccggggactttccggggactttccgggactttccatctgccatctcaattagtcagcaaccatagtcccgcccctaactccgcccatcccgcccctaactccgcccagttccgcccattctccgccccatggctgactaattttttttatttatgcagaggccgaggccgcctcggcctctgagctattccagaagtagtgaggaggcttttttggaggcctaggcttttgcaaaaagctt

SEQ ID NO: 11 - DNA, 706 bp, Homo sapiens
ggcttatcgtgaacctggccttggtggacctgggactggcactcactctccccttttgggcagccgagtcggcactggactttcactggcccttcggaggtgccctctgcaagatggttctgacggccactgtcctcaacgtctatgccagcatcttcctcatcacagcgctgagcgttgctcgctactgggtggtggccatggctgcggggccaggcacccacctctcactcttctgggcccgaatagccaccctggcagtgtgggcggcggctgccctggtgacggtgcccacagctgtcttcggggtggagggtgaggtgtgtggtgtgcgcctttgcctgctgcgtttccccagcaggtactggctgggggcctaccagctgcagagggtggtgctggctttcatggtgcccttgggcgtcatcaccaccagctacctgctgctgctggccttcctgcagcggcagcaacggcggcggcaggacagcagggtcgtggcccgctctgtccgcatcctggtggcttccttcttcctctgctggtttcccaaccatgtggtcactctctggggtgtcctggtgaagtttgacctggtgccctggaacagtactttctatactatccagacgtatgtcttccctgtcactacttgcttggcacacagcaatagctgcctgaacccaattgtctacgtcttaagccg

SEQ ID NO: 12 - DNA, 1413 bp, Homo sapiens
ggcacgagaagaaattccattcaaatttatctacttaacgtagccattgcagacctcctactcatcttctgcctccctttccgaataatgtatcatattaaccaaaacaagtggacactaggtgtgattctgtgcaaggttgtgggaacactgttttatatgaacatgtacattagcattattttgcttggattcatcagtttggatcgctatataaaaattaatcggtctatacagcaacggaaggcaataacaaccaaacaaagtatttatgtctgttgtatagtatggatgcttgctcttggtggattcctaactatgattattttaacacttaagaaaggagggcataattccacaatgtgtttccattacagagataagcataacgcaaaaggagaagccatttttaacttcattcttgtggtaatgttctggctaattttcttactaataatcctttcatatattaagattgggaagaatctattgaggatttctaaaaggaggtcaaaatttcctaattctggtaaatatgccactacagctcgtaactcctttattgtacttatcatttttactatatgttttgttccctatcatgcctttcgattcatctacatttcttcacagctaaatgtatcatcttgctactggaaagaaattgttcacaaaaccaatgagatcatgctggttctctcatctttcaatagttgcttagatccagtcatgtatttcctgatgtccagtaacattcgcaaaataatgtgccaacttctttttagacgatttcaaggtgaaccaagtaggagtgaaagcacttcagaatttaaaccaggatactccctgcatgatacatctgtggcagtgaaaatacagtctagttctaaaagtacttgaggtaaacatactaaaatgaattatataatgcagcctcttaattctttgaagaactaaaaaattaggaaacaaagttctagcatttacaaaactcagatctcaaagctctgcttgtatttgtgatatttcatttgcttaactgtaaaccatttcaaggtactaacttttaaatctgtatgtaaaatcttttcaaaatacatttttaagctaatactcttaacatagattatgaagttaagtgaaatttatggctctaacagcaaaataattaaagtgccatagtttctcaagtgactaaagtagttattaaaatcaagcacttgatactaatttgaagtgtgtttaaaagtaaatgatttgggaactgacaatgtgtcagaaaatatatgttcatttatcattttaaaatcttgtataatttgccactgtattcatttatgcctaaatctctataacagatgaaaagataattaataaaatcctaattaaaaaatgaaaaaaaaaaaaaaaaaa

SEQ ID NO: 13 - DNA, 2273 bp, Homo sapiens
ggcacgagggagtgtccgctgtgcctggtgcggctgccgcctgagcgggccccgcgcctcctcagctgtccgcaccgctcgtgccgggactgcctccgccactacctgcgcctggagataagcgagagcagggtgcccatcagctgccccgagtgcagcgagcgactcaacccgcacgacatccgcttgctgctcgccgacccgccgcttatgcacaagtacgaggagttcatgctgcgccgctacctagcctcggaccccgactgccgctggtgcccggccccggactgcggttatgctgttattgcctatggctgtgccagctgcccgaagctaacttgtgagagggaaggttgccagactgagttctgctaccactgcaagcagatatggcatccaaatcagacatgcgatatggcccgtcaacagagggcccagactttacgagttcggaccaaacacacttcaggtctcagttatgggcaagaatctggaccagatgacatcaagccatgcccacgatgcagtgcatacattatcaagatgaatgatggaagctgtaatcacatgacctgtgcagtgtgtggctgtgaattctgttggctttgtatgaaagagatctcagacttgcattacctcagcccctctggctgtacattctggggcaagaagccatggagccgtaagaagaaaattctttggcagctgggcacgttgattggtgctccagtggggatttctctcattgctggcattgccattcctgccatggtcattggcattcctgtttatgttggaaggaagattcacagcaggtatgagggaaggaaaacctccaaacacaagaggaatttggctatcactggaggagtgactttgtcggtcattgcatccccagttattgctgcagttagtgttggtattggtgtccccattatgctggcatatgtttatggggttgtgcccatttctctttgtcgtggaggcggctgtggagttagcacagccaacggaaaaggagtgaaaattgaatttgatgaagatgatggtccaatcacagtggcagatgcctggagagccctcaagaatcccagcattggggaaagcagcattgaaggcctgactagtgtattgagcactagtggaagccctacagatggacttagtgttatgcaaggtccttacagcgaaacggccagctttgcagccctctcagggggcacgctgagtggcggcattctctccagtggcaagggaaaatatagcaggttagaagttcaagccgatgtccaaaaggaaattttccccaaagacacagccagtcttggtgcaattagtgacaacgcaagcactcgtgctatggccggttccataatcagttcctacaacccacaggacagagaatgcaacaatatggaaatccaagtggacattgaagccaaaccaagccactatcagctggtgagtggaagcagcacggaggactcgctccatgttcatgctcagatggcagagaatgaagaagaaggtagtggtggcggaggcagtgaagaggatcccccctgcagacaccaaagctgtgaacagaaagactgcctggccagcaaaccttgggacatcagcctggcccagcctgaaagcatccgcagtgacctagagagttctgatgcacagtcagacgatgtgccagacatcacctcagatgagtgtggctccccccgctcccatactgcagcctgcccctcgacccccagagcccaaggtgcaccgagcccaagtgcccatatgaacctctctgccctagccgagggacaaactgtcttgaagccagaaggtggagaagccagagtatgaagtggaatgaatgctcctgttctgagaagcacacttgtaactgcatcttttggaatttttttttttttttttccaaggggtagagatttatgtattttatttcacagattctctggtcacaggtttttgcccagggaaattctgagaaattcacaatttcttaccagataaaacatgaaaagtttgccgttagttcccctcccctcccctccctctttttagttttaatttattggttaaactgatggcagcaatccatgaggtgtgtcaaagagtgtacatatgtatgtgtgtatattgaatgctaaacatattactgaaagacacattttaataaagatttctgtcataattcaaaaaaaaaaaaaaaaaaaaaaaaaaaaaaaaaaaaaaaggggccgctcgcgatctagaactag

SEQ ID NO: 14 - DNA, 1095 bp, Homo sapiens
  SITE (33): n equals a,t,g, or c
  SITE (41): n equals a,t,g, or c
  SITE (48): n equals a,t,g, or c
  SITE (57): n equals a,t,g, or c
  SITE (63): n equals a,t,g, or c
  SITE (228): n equals a,t,g, or c
  SITE (431): n equals a,t,g, or c
  SITE (989): n equals a,t,g, or c
attgcaactttctgtccactcaagttccaagcnagtttttncttcaancttcccaangtaacntgggatttccaggccacccgccaccatgttcagctaatttttagtattcttcatagagatgggttttgccatgttggccagctggtcttgaattctgactttaggygatccacytgccttggsctcccaaagtctgggattacaggtgtaagccactgcatctgnctgtctttttactacctttcaattgggttgtttgctttctttctgttgagttttgagaattctttacacattctggagtagtttccctgatttgcaaatgctgcttgatggttcccaggtgccagagcagtgctgggtatggaagctgtagcccaagtgaagatggcctgcaggagcctcctgacagggctgaggccagccgnccagcaagctgttgttacctctgagtgggctgagggcacacaggacatgtctgctccagccttgagtgtccagcatgactttccagatgaggcgttcctgagccagggtttatccaaactccttgcccagttgtctgtggttattccacttccacaggtctcattggttccttgccccactccagccaggctgcacactcgccagtcctccgtcgcagtgatccacctytcgcctgggcaggaatcagtgctcagcccttacctgagtgcattgtcagcagcaccccactccttttctggctacgcctgtcctggcacactttctttcccagccttctttccctgcctgcacaccctcctgatgcttsttccatctcctccgttgctctttctgcatctcctttgtaggaggcggtggtcttctccagaagaaccctgaatgcacaactgtactcagatttctgtctttaatcccctactctattctctctcagtcccctaggtcatcttggtaagaaccatgtctttaaatattaggaatgtgtttggttggacctntctcctgcttcctgaaataaacactggtgccaaccaaaaaaaaaacaaaaaaaaaaaaaaaaaaaaaaaaaaaaaaaaaaaaaaaaaaaaaaaaaaaaaactcgag

SEQ ID NO: 15 - DNA, 619 bp, Homo sapiens
  SITE (28): n equals a,t,g, or c
  SITE (600): n equals a,t,g, or c
  SITE (613): n equals a,t,g, or c
ccggccatcccgaatgttatggccgccntcgccgtcttgcgggccttcggggcaagtgggcccatgtgtctccggtgcggcccctgggcccagctccccgcccgcttctgcagccgggacccggccggggccagcagtgccggagtcggagccgcggysgaccagcgcgcgagctggacggcataaggaacatcgkcttgagcaatcccaagaagaggaacacgttgcacttgcaatgctgaaatctctccaaagtgacattcttcatgacgctgacagcaacgatctgaaagtcattatcatctcggctgaggggcctgtgttttcttctgggcatgacttaaaggagctgacagaggagcaaggccgtgattaccatgccgaagtatttcagacctgttccaaggtcatgatgcacatccggaaccaccccgtccccgtcattgccatggtcaatggcctggccacggctgccggctgtcaactggttgccagctgcgacattgccgtggcgagcgacaagtcctcttttgccactcctggggtgaaacgtcgggctcttctgttctacccctggggttgccttggcaagagcatgcntagaaagtgggcntggaaa

SEQ ID NO: 16 - DNA, 599 bp, Homo sapiens
  SITE (145): n equals a,t,g, or c
  SITE (491): n equals a,t,g, or c
  SITE (536): n equals a,t,g, or c
  SITE (548): n equals a,t,g, or c
  SITE (569): n equals a,t,g, or c
cctagtcttgacctcttttaaactccaaattcgcacccccaactgccaactaccacctgtggtcctgccatttgtccccagatcagattggaatggtacatctgcttgaccaagcctggatcacatgcctaggctctagctgcangaagagcccagaaagtacctgtttttttagcttctgtagtagcatagaagtacaacctcccaccaaaacccaggaggtggtccagtccccaggcagttcggatgctccctccgcattgtgcttctgctgccttacctctatcggtggcctcattaaactcctaggcccccaggttcaactcctgaacattttcctggacttgtccccacatccaaatcagccacatcaaaacccatcacttcttcctgtgtagcacctctcatccattcccttccctctggtacccctgcctccatgtcagcacattcattcagcaggcactgagggtctcctgtgtgccaggagntatgttcaaggggagtgtgggattacaacggtgctcttggggaantggcagtcttantgggtgaggcagacacaagantgtttggaagacggttttggaaagcattgt

SEQ ID NO: 17 - DNA, 2174 bp, Homo sapiens
  SITE (24): n equals a,t,g, or c
  SITE (176): n equals a,t,g, or c
  SITE (1323): n equals a,t,g, or c
  SITE (1900): n equals a,t,g, or c
  SITE (1968): n equals a,t,g, or c
attcggcacgatgagatcctacancccgaggagattaagctgcaggaggccatgttcgagctggtcacttccgaggcgtcctactacaagagtctgaacctgctcgtgtcccacttcatggagaacgagcggataaggaagatcctgcacccgtccgaggcgcacatcctcttctncaacgtcctggactgctggctgtcagtgagcggttcctcctgggagctggagcaccggatggaggagaacatcgtcatctctgacgtgtgtgacatcgtgtaccgttatgcggccgaccacttctctgtctacatcacctacgtcagcaatcagacctaccaggagcggacctataagcagctgctccaggagaaggcagctttccgggagctgatcgcgcataggagctcgaccccaagtgcagggggctgcccttctcctccttcctcatcctgcctttccagaggatcacacgcctcaagctgttggtccagaacatcctgaagagggtagaagagaggtctgagcgggagtgcactgctttggatgctcacaaggagctggaaatggtggtraaggcatgcaacgagggcgtcaggaaaatgagccgcacggaacagatgatcagcattcagaagaagatggakttcaagatcaaktcggtgcccatcatytcccaytcccgytggytgytgaagcagggtgagytgcagcagwtktmaggccccaagacytcccggaccctgaggaccaagaagctcttccacgaaatttacctcttcctgttcaacgacctgctggtgatctgccggcagattccaggagacaagtaccaggtatttgactcagctccgcggggactgctgcgtgtggaggagctggaggaccagggccagacgctggccaacgtgttcatcctgcggctgctggagaacgcaratgaccgggaggccacctacatgctaaaggcgtcctctcagagtgagatgaagcgttggatgacctcactggcccccaacaggaggaccaagtttgtttcgttcacatcccggctgctggactgcccccaggtccagtgcgtgcacccatacgtggctcagcagccagacgagctgacgctggagctcgccgacatcctcaacatcctggacaagactgacgacgggtggatctttggcgagcgtctgcacgaccaggagagaggctggttccccagctccatgactgaggagatcttgaatcccaagatccggtcccagaacctcaaggaatgtttccgtgtccacaagatggatgaccctcagcgcagcagaacaaggaccgcangaagctgggcagccggaatcggcaatgacccccacccagggggccagcgggagcagggcctgcatgagaccccgacagaaggtggggggggggctctgggaagcacaggccagcacctccccaggtggcaggatctggcttggggtgcccggccctcatccctgcccacgcatrrgtgctcatgtgtcttggccccttgctygcaaactggataaagggtgcccaagcctctcctgatgcatttgtaaacaagaaggtttcagcagtattacaccacctccctcatgcctccgagggggtggaagggggtgggcacactccagggccccccatgcccctggcccccagggactggaagaggctcccaacccagagtgtccctgtgggaggcaggcagaaggtgacaattgacacgatttcctgcacgcgtcctcctctaccttggaagcagttagaatctaccaggcacagatgaggccgcccttgcctgacggagcttgatgagcagcccttggtctccggttccaggactgagagcccagctgcctctgcccacccttccccaggcctctgccancctctggctgcacggtcaggccctgccccatggcaggcctgccagagcttggctggggacccctcccncctctggctccctgatgggctggatgtaacttgtgtcttctagccscttaaggagcccaggtgttttaaggaatgaattggtcactgcatcttgtatcgattatggttctgagaaaagcaaatatcacttttggctgcattaaaagaagcatcatatataaaataaaraaaaaaaaaaaaaaaaaactcggggggggggcccggta

SEQ ID NO: 18 - DNA, 466 bp, Homo sapiens
  SITE (16): n equals a,t,g, or c
  SITE (162): n equals a,t,g, or c
  SITE (164): n equals a,t,g, or c
tggggctggggagganaggagcttcaatgtgccattctggttggggagaggataggacatttctgggtccttggctgctgcggtagaggtatggggaggaaaaactctagagtgggagatgtggaagtggaaaaggaaggccctgtccaggcctggcctgtntntctggagacagaaaactccccaggggacagagaggttacccccttgtgcttagcttctgccacccttcccttctctggaggagaagctgccctctcctcagcaaccctggcctttattctatgcataaccactgcargggcacccctggccaggctgaatgggtgggggtcccagggcacctkcaataaatctcagaatgggagggtatcctggggacaaagagggggtacagaaggtgccaggggggaaaaggtgattcctccatctcttctctcacccaaatccccccagatcgaatctg

SEQ ID NO: 19 - DNA, 1691 bp, Homo sapiens
  SITE (1421): n equals a,t,g, or c
tttttttttttttttttttttctttttcatgatctttatttatcctcgagacgcttggatccagtaagcgagtgacaatttcaagactgccagccatgcacctctgtatgtttttggcccaagcagcagccgtgggcctagtgccaaccctcacacgctagctacctcctcctgtgcttggagtggaaagtctgtggggttctctgtctggttctgcaagcttttcacaccatctcttcgctgtctgtctctatgctaggggtttcacacaactctacaccattgcattcatgcttgccgtatccctgactttctgcacaagtgcagggcagagatggcccttttgttttggtgagggagagagggaaacacttgggcacaaagaggggaagggactgtgaatcccagggagcaccctggccagatcccagcggtgttcgaatcccaggaccatcttccatctacagcctagctgcctccttccctggtcaacccttcctgggtgcccatccaccacactgcccaacctcactccccgtcccctcccacaaagagtgacagtggcctggggctcggcctctcctgaccccaggggaggatgggtgatctgggcctcctgctacctgccacctgggcctcctatctccagctgggagccagggacctacccacgggcctggcctgacctctctccccctcccctcatgcttccagaccctgccgcagcctgcggtccagggccaggagctgcctcaggaagccccggttggggatgatgcctcggtggtctttgactttcttgatggcctccacgagggtaaggtggtggtacagcatgaggtaggccartaccagggtggcggatcggctcacgcccacagcacaatgcaccaggatcttccctcctggctggctcagcgcccggtggatgaartcggcagccgtctggaagtggatgctcatgtcaaaggctggcgagtcgtgggcctcaacacccaggtagcggatgcccagcccctcataggcctcgggcgtgcctcgccaccggctgtgtgaggcattgaggacgtgcgtgatgcccaggcggcgaagctcccggcggttgttagccatgtcctggtctccgagatagaggcctggccagacctcgtcggcatggttacaggctgtcttgcctgtgtagaggagccgctccaactcgaagacattgaggaaaggatgttgaacggttggcatctcctccagggtccctcgagttcgaacaggagaccttgagctactccgggagaagcgggccataaaagtcatagaagcccaaagccagttaccagggcacatcttagaggtggcagaaaccgtggcagctgcaggagtggctgtggtgatgatgggttcagttgccaggtagctgctctttgcanagctgcgctgggcctcagtccgaaagcggatcgccgcagacagcccacggccatgacgctcctgytgtgcgccgctttttgcccaagacaggttacagatagcgtatttaagcatgacacacacgtcgaagcaggttaaatcagcgtgtgcgctggtgacataaagggactcggtcttacattcggtggcccgagtcgccaggcagcgtgggctccccagccaaccccccacgagcccgcgcgccttgcagaccagacacggccccgccg

SEQ ID NO: 20 - DNA, 412 bp, Homo sapiens
  SITE (183): n equals a,t,g, or c
  SITE (300): n equals a,t,g, or c
  SITE (364): n equals a,t,g, or c
  SITE (383): n equals a,t,g, or c
  SITE (384): n equals a,t,g, or c
ggcacagtaggcaccaagtaccctcctctcagaataagaaaagcgcctggcgtctgctgggggcacagtccatgcgtcctcaggcacagctggagggtgcccccttttcctatgccttttttcctagggaacatttcatcaaatgggacaaaagcccattccaatcccaggagcccttggggnaaacaccgcccaggcaccaggccggcatcgggggaagagagcagccacagctgttcctcggtgcctttttctgcctggtgcctgtctgggtttcacctgggcctcccactgcctcantctggcacaccccttcttccagctccacctgcagcgttccctgggaacattccacattggccangggctggccctgggttctnntttccaaattcttgggcagggatttggg

SEQ ID NO: 21 - DNA, 488 bp, Homo sapiens
  SITE (430): n equals a,t,g, or c
  SITE (459): n equals a,t,g, or c
  SITE (466): n equals a,t,g, or c
  SITE (480): n equals a,t,g, or c
catcaacgattccctggcactcaaggccggcgtagtcgktgtggccatgggcgcgggcggggcggatattgccctggcgtcggcggacgtggtgctgatcggcagcgacctgcggcgcctgggcacctgtgtgcgcttgagccgccagtgccggcagaccttgcaggtcaacgtgatcatcggcctgggttggaccttggccattgtcgtattcgccgcgtttggctggttgggggcggcgggcgccatgattgcagcggtgctgcataacctcagtactttgctggtactggggaatgccgggcgtttgctacgyttccaggagccccttttgaagytcgaagaataattttcagaaatatttgcacgcggctgtaaacgcggctgaaggggctcaatctagtggtgtgtcgagactgaacaatccgtncagaccgacacccctaagatcatgaggantacaacnatgaacatcaaatncgctgctg

SEQ ID NO: 22 - DNA, 422 bp, Homo sapiens
  SITE (363): n equals a,t,g, or c
  SITE (385): n equals a,t,g, or c
  SITE (388): n equals a,t,g, or c
  SITE (417): n equals a,t,g, or c
gagaggagaggagagaagagccgcggggggcccagcccggagccaggatgcccgcgccggccccgggagcagccccgcgtgcccggggagcgccaccgctgctgcctcgcggtgcgcggggccctcgacggtggcggcgggcggcgggcgcggccgtgctgctggtggagatgctggagcgcgccgccttcttcggcgtcaccgccaacctcgtgctgtacctcaacagcaccaacttcaactggaccggcgagcaggcgacgcgcgccgcgctggtattcctgggcgcctcctamctgctggcgcccgtgggsggctggctggccgactgtacctgggccgctaacgcgcggtcgcgctcancctgctgctctaactggccgcntcnggcctgctgcccgccaacgctttcccganggccg

SEQ ID NO: 23 - DNA, 843 bp, Homo sapiens
  SITE (28): n equals a,t,g, or c
  SITE (341): n equals a,t,g, or c
  SITE (366): n equals a,t,g, or c
  SITE (763): n equals a,t,g, or c
  SITE (767): n equals a,t,g, or c
  SITE (786): n equals a,t,g, or c
  SITE (807): n equals a,t,g, or c
ggaccagcaagagcagactaggaaaggnagagaagggaaggagaaaaggaaactagaatgcatttctgtaggccacctgttgagacctggtgaaagatcaggtataataatgttctgcagtgaaaagaaattgcgtgaagtggaacggatagtgaaagccaatgaccgtgaatataatgaaaagttccagtatgcggataatcgtatccacacatcgagatataatattctcaccttcttgccaattaatttatttgaacagttccaaagagtggcaaatgcctattttctttgccttctgattttacagctaattccagaaatttcctccttgacctggnttaccaccattgtgcctttggtccnggtgataactatgacagctgtcaargatgccacagatgactattttcgccacaagrgtgataatcaagtgaataatcggcagtctgaagtgctcatcaacagcaaactgcagaatgaaaaatggatgaatgtcaaagtgggagacatcattaaattagaaaataaccaatttgttgctgctgatttacttctcctatcaagtagtgagccacatggtctctgttatgttgaaactgctgagcttgatggggaaacgaacctaaaagtccgccatgcactatcagttacttcagaacttgggagcagattatcagcagacttgcaggggtttgatggtccctgacactaaactaatgccagaattagtggtaagacaaagttttaaaaggacaagccntggntagattggtggaatactcnagtactatgggatttttgggntttccgatatgcctggggaattaattcctggcatta

SEQ ID NO: 24 - DNA, 1337 bp, Homo sapiens
  SITE (977): n equals a,t,g, or c
  SITE (983): n equals a,t,g, or c
  SITE (990): n equals a,t,g, or c
  SITE (1003): n equals a,t,g, or c
  SITE (1034): n equals a,t,g, or c
  SITE (1035): n equals a,t,g, or c
  SITE (1036): n equals a,t,g, or c
  SITE (1040): n equals a,t,g, or c
gttctagatcgcgagcggccgcccgcgatcttagaactagatgagaaacctgttataattgccagctgtctacacaaagaatatgcaggccagaagaaaagttgcttttcaaagaggaagaagaaaatagcagcaagaaatatctctttctgtgttcaagaaggtgaaattttgggattgctaggacccartggtgctggaaaaagttcatctattagaatgatatctgggatcacaaagccaactgctggagaggtggaactgaaaggctgcagttcagttttgggccacctggggtactgccctcaagagaacgtgctgtggcccatgctgacgttgagggaacacctggaggtgtatgctgccgtcaaggggctcaggaaagcggacgcgaggctcgccatcgcaagattagtgagtgctttcaaactgcatgagcagctgaatgttcctgtgcagaaattaacagcaggaatcacgagaaagttgtgttttgtgctgagcctcctgggaaactcacctgtcttgctcctggatgaaccatctacgggcatagaccccacagggcagcagcaaatgtggcaggcaatccaggcagtcgttaaaaacacagagagaggtgtcctcctgaccacccataacctggctgaggcggaagcyttgtgtgaccgtgtggccatcatggtgtctggaaggcttagatgcattggctccatccaacacctgaaaaacaaacttggcaaggattacattctagagctaaaagtgaaggaaacgtctcaagtgactttggtccacactgagattctgaagcttttcccacaggctgcagggcaggaaaggtattcctctttgttaacctataagctgcccgtggcagacgtttaccctctatcacagacctttyacaaattagaagcagtgaaagcataactttaacctggaagaatacagcctttctccagtgcacactgganaaggtntccttanaaccttcctaaanaacaggaagttaggaaattttgaatgaaaannnaccnccccccctcattcaggtggamccttaaamcctcaaacctagkaattttttgktgaycycctataaamcttatgktttatgtaataattaatagtatgtttaattttaaagatcatttaaaattaacatcaggtatattttgtaaatttagttaacaaatacataaattttaaaattattcttcctctcaaacataggggtgatagcaaacctgtgataaaggcaatacaaaatattagtaaagtcacccaaagagtcaggcactgggtattgtggaaataaaactatataaacttaa

SEQ ID NO: 25 - DNA, 785 bp, Homo sapiens
gcactcttggagttagatatttaagaatccttcctgccttgacagccagtctgtgaaatgatggtgaggtgggcacttctttgtgaattctggggagacattgccaaggaattttactggaagactccatgccctggcccattccttcggtacaactttgatgtgactaaagggaaaatcttyattgagtggatgaaaggagcaactaccaacatctgctacaatgtactggatcgaaatgtccatgagaaaaagcttggagataaagttgctttttactgggarggcaatgagccaggggagaccactcagatcacataccatcagcttctggtccaagtgtgtcakttcagcaatgttctccgaaaacagggcattcagaagggggaccgagtggccatctacatgcctatgatcccagagcttgtggtggccatgctggcatgtgcccgcattggggctttgcactccattgtgtttgcaggcttctcttcagagtytctatktgaacggatcttggattccagctgcagtcttctcatcactacagatgccttctacaggggggaaaagcttgtgaaacctgaaggagctggctgacgaggccctgcagaagtgtcaggagaagggtttcccagtaagatgctgcattgtggtcaagcacctggggcgggcagagctcggcatgggtgactccaccagccagtcccccccaattaaagaggtcatgcccagatgtgcagatcttcatgggaaccaagggattgacttgtggtgggcatgag

SEQ ID NO: 26 - DNA, 410 bp, Homo sapiens
ggtggccgcacgcgcggcccggcttctgtcctcgcggcgctccggctcctggccccccacgccatgcagccgtccccgccgcccaccgagctggtgccgtcggagcgcgccgtggtgctgctgtcgtgcgcactctccgcgctcggctcgggcctgctggtggccacgcacgccctgtggcccgacctgcgcagccgggcacggcgcctgctgctcttcctgtcgctggccgacctgctctcggccgcctcctamttctacggagtgctgcagaacttcgcgggcccgtcgtgggactgcgtgctgcagggcgcgctgtccamcttcgccaamamcagctccttcttctggamcgtggcmattgcgctctattgtamctcacatcgtccgcgccgcgcgcgggccttgca

SEQ ID NO: 27 - DNA, 445 bp, Homo sapiens
  SITE (401): n equals a,t,g, or c
  SITE (417): n equals a,t,g, or c
  SITE (422): n equals a,t,g, or c
gaccgtggggagggggtcgggagagagagatacttcagagtggacagggctgagaaagctttatgggccgcgaaaggcagagtagttgttggtggatgagggtggctgtggcaggtggcgtttcaggtgagacagctcggggcccagaaagacactgggaggaggagagctctgctctccagagaaacaggagcagagaggaaaacagagccgcagcgagcggcttgtggtctggggatgaagcccaggttgacagcatcctctgcttcgctggtggaggtgggggcatcattctcacacctgtgctgggtcctgtccctgccagccaagggagaccaggaccctgccactgttgcgctcaggatagtccagaactgtcagatttttctgttgaatttaanttctaatacacttgtnatttnaaatccagttgccagattttaaa

SEQ ID NO: 28 - DNA, 529 bp, Homo sapiens
  SITE (15): n equals a,t,g, or c
  SITE (18): n equals a,t,g, or c
ggccttctgagtagntgngaccacaattgtgatcaccatgcccacctaaatttttgtactctttgtagagacagggttttgccatgttgcccaggctggtctcaaactcctgggctcaagcaatctgcccacctcagcctcccaaagtgctgggattacaggtgtgagccatggcacccagccatctccagactttcataattttcctcacatattgtacatacttaattatattattcaattatatgtataaaaaaagaaagcaagaattcaactatgttgtattaccaaggcctttctgtacccaatctcgcctcatattttttcttttttttttattttttgagacggagtcttgccctgtcgcccaggctggagtgcagtggcgtgatctcagctcactgcaagctccgcctcgtgggttcacgccattctcctgcctcagcctcctgagtagctgggactacaggcacccaccaccatgcccagctaattttttgtattttttagtagagacagggtttcacct

SEQ ID NO: 29 - DNA, 687 bp, Homo sapiens
aaatcaatcattccctccagttatgtccctgacccacaggcttcatttgtgcaagtactggggctgtgctgtcagtaatgtgtgccgcttctgggaaggacgtccattgcccttgatgattgtggtaccatacacactgcctgtttccttgcctgttggttcgtgcgtgataatcacagggacaccgatcctcacttttgtcaaggacccacagctggaggtgaatttctacactgggatggatgaggactcagatattgctttccaattccgactgcactttggtcatcctgcaatcatgaacagtygtgtgtttggcatatggagatatgaggagaaatgctactatttaccctttgaagatggcaaaccatttgagctgtgcatctatgtgcgtcacaaggaatacaaggtaatggtaaatggccaacgcatttacaactttgcccatcgattcccgccagcatctgtgaagatgctgcaagtcttsagagatatctccctgaccagagtgcttatcagcgattgagggagatgatcagactcctcattgttgaggaatccctctttctacctgaccatgggattcccagagcctactaacagaataatccctcctcaccccttcccctacacttgatcattaaaacagcaccaaacytcaaaaaaaaaaaaaaaaaaactcga

SEQ ID NO: 30 - DNA, 905 bp, Homo sapiens
  SITE (715): n equals a,t,g, or c
aattcggcacgagcagaaacaaaacagctttttctggagggctytctgcacccctgcaatgtcctaatgtgccccmacacctgygtcacaaacttgcctaagcctcgacagaagcagccagaaatcggccctgcctctgtgatggtggggaacctggtctctgggaagagaatcgcccaggccagtggcagagacctgggtcagatcgaagataacgaccaggcacgcaagttcctgttcctctcagaggtcttgcagtggagagcacagaccaccccggaccacatcctctacacgctgctcaactgtcggggtgcgatagcgaactcgctgacctgcgtgcagctgcacaagagagctgagaagatcgccgtgatgctgatggagaggggccaccttcaggacggcgaccacgtggccttggtctaccccccaggaatagacctgatagcagcgttttatggttgcctgtacgcaggctgtgtgccaataaccgtccgtcccccgcacccacagaacatcgcgacgacgttgcctaccgtcaagatgattgtggaggtgagtcgctctgcctgtctgatgacgacacagctgatctgtaagttgctgcggtccagggaggcggyggcggctgtggacgtcaggagtggcccctcatcctggacacagwtggtgctttactgctgaaggtggtttgctcacggccttgctcagnggaagatctgctgatagtcatgttcctctccagatgatttgccaaagaagcggcctgcccagatctgcaaaccttgcaacccagacactcttgcatatctcgacttcagcgtgtccacaactgggatgctagctggcgtaaaggtgaagggggtggctgcgggcggtggccatggaaggcaaatgcggaa

SEQ ID NO: 31 - DNA, 635 bp, Homo sapiens
atgggatacgctctctccgaaactggccccagcggaagatgttcgtggggcgctggcgctggtcgaacgtaacgaagcgcctctgggcattgtctacggttctgacgcattgccagcaaaggggtaaaagtggttgccaccttcccggaagattcacataaaaaagtggaatatccggttgctgttgtggaagggcataacaatgcgacagtgaaagcattttatgattatctgaagggaccgcaggcagcggaaatctttaaacgttacggatttacaatcaagtaatgatactgaccgatccagaatggcaggcagttttattaagcctgaaagtttcttccctggctgtgctgtttagcctgccgtttgggatcttttttgcctggttactggtgcgttgcacgtttccgggcaaagctctgctcgacagcgtactgcatctaccgctggtgttaccgcccgtggtcgtcggttacttattattagtttcgatgggacggcgcggatttatcggtgaacgtctgtatgactggtttggtattaccttcgcctttagctggcgcggcgcggttctcgctgccgccgtcatgtcgtttccgctgatggtgcgggcaattcgtctggcgctggaa

SEQ ID NO: 32 - DNA, 985 bp, Homo sapiens
  SITE (747): n equals a,t,g, or c
ggccagcgtcagggaggagaacacaaacgcccacgcggctttatccatacgtgcagtcaggatggtcagcaatatcagggcgcggcaactcgttttgaactgaaattgaacggcggtgaaaaactgcttgtgagtcaggccaatatgacaggcgaagaactgcctgccacgctcacgcccggacaacaggtgatggtttcctggtcgcgtgatgtgatggtgccgctggttgaggagaggtgaatggcgatgaatgtattgcaatcaccttcacgtccaggtctgggtaaggtgtccggtttcttctggcataatccggggctggggctgtttttactgctgcttggcccgctaatgtggtttggcattgtctatttcggctcgctgctgacactgttatggcagggattttatacttttgacgatttcaccatgtcggtaacgccggaactgacgctggcgaatatccgtgcgctgtttaatccggcgaatacgacatcattctccgcacgctgactatggctgtggcagtcactacgccagcgccattctggcttttccaatggcgtggtatatggcgcgctataccagcgggaaaatgaaagcgtttttttatattgcggtaatgttgccgatgtgggcgagctacattgttaaagcctatgcctggacgttattgctggcaaaagatggcgtggctcagtggtttttacaacatcttgggctggaaccactgctgactgcgtnccttacattacctgcggtgggcggaaatacgctgtcaacttccgggctggggcgctttctggtgtttctctatatctggttgccgttcatgatcctgcccgttcaggcggcgcttgagcgtttgccgccgtcattgttgcaggcgtcggctgatctcggcgcacgtccacgacaaacctttcgctatgtggtgctgccgctggcaatcccgggtattgccgctggctctatctttacc

SEQ ID NO: 33 - DNA, 1659 bp, Homo sapiens
agctcgaaattaaccctcactaaaagggaacaaaagctggagctccaccgcggtggcggccgctctagaactagtggatcccccgggctggcgctggaacgactgttccgtgacgatttgcaggacggcagtcttgaacaattgatgttgttgccgttacccttgcccgccgttgtgctggcgaaggtgatggcgcactggatggtaaccggtctgccgttactcatcctttcgccactggtagcaatgctactgggaatggatgtttatggctggcaagtgatggcgctgacgctgctgctgggaacgcctacgcttggctttctcggtgcaccgggcgtggcgctgacagtgggacttaagcgcggtggtgtgctgctcagcatactggtgttaccgctgactatcccattactcatctttgccaccgccgcgatggacgcggcttctatgcatttgcccgttgacgggtatctggcaattttaggcgcgttgctggcaggcaccgcgacattaagtccttttgcgacggcggcagcgttacgaatcagcattcaataacgctggattactgatttttgtccgagtctggtatcgaaactatgtggaaaacactgcatcaactggcgatcccaccacggctgtatcaaatctgtggctggtttataccgtggctggcaattgccagtgtggtcgtgcttaccgtcggctggatctggggattcggctttgctccggctgattatcagcagggaaatagctaccgcattatctacctgcatgtgcctgcggcgatctggtcaatgggcatttatgcatcaatggcagtggcagcgtttattggccttgtctggcagatgaaaatggccaacctggcggtggcggcgatggcccccattggtgccgtgtttacctttattgccctggttaccggctctgcatggggaaaaccgatgtggggcacctggtgggtatgggatgcacgtctgacttctgaactggtgctgctgtttttgtatgtgggtgtgattgccctgtggcacgccttcgacgaccgccgtctggcgggccgtgcggcaggtatcctggtgctgattggcgtggtgaatctgccgattattcattactccgtggagtggtggaacaccctgcatcagggatcaacgcggatgcagcaaagtatcgatccggcgatgcgttcgccgctgcgctggtcgatttttggcttcctgctcctgtctgccacgctgacgctgatgcggatgcgtaatttgattttgctgatggaaaaacgccgtccgtgggtgagtgaactgatactgaaaagaggccgtaaatgacccctgcatttgcttcctggaatgaatttttcgcaatgggcggttacgccttttttgtctggctggcggtggtgatgaccgttattccgctggtggttttggtcgtgcactcggtgatgcaacatcgcgcaattctgcgtggcgtggcgcaacagcgggcgcgtgaggcgcgtttacgtgtgcgcaacagcaggaggctgcatgaatattcgccgtaaaaaccgcttgtggattgcctgtgccgtgttggcagggctggcgctgactatcggtctggtgctatattggtgcgctcgaatatcgatctcttttatacgcc

SEQ ID NO: 34 - DNA, 939 bp, Homo sapiens
  SITE (919): n equals a,t,g, or c
  SITE (927): n equals a,t,g, or c
gcgccgcgcgggtctggcgggaccggtttggaagactttsccggcctgcagattggccttaagagaaggacggagccacatactgctgacggcccagaactggcagagagaaggttgccatggctgctgttgacagtttctacctcttgtacagggaaatcgccaggtcttgcaattgctatatggaagctctagctttggttggagcctggtatayggccagaaaaagcatcactgtcatctgtgacttttacagcctgatcaggctgcattttatcccccgcctggggagcagagcagacttgatcaagcagtatggaagatgggccgttgtcagcggtgcaacagatgggattggaaaagcctacgctgaagagttagcaagccgaggtctcaatataatcctgattagtcggaacgaggagaagttgcaggttgttgctaaagacatagccgacacgtacaaagtggaaactgatattatagttgcggacttcagcagcggtcgtgagatctaccttccaattcgagaagccctgaaggacaaagacgttggcatcttggtaaataacgtgggtgtgttttatccctacccgcagtatttcactcagctgtccgaggacaagctctgggacatcataaatgtgaacattgccgccgctagtttgatggtccatgttgtgttaccgggaatggtggagagaaagaaaggtgccatcgtcacgatctcttctggctcctgctgcaaacccactcctcagctggctgcattttctgcttctaaggcttatttagaccacttcagcagagccttgcaatatgaatatgcctctaaaggaatctttgtacagagtctaatcccttttctatgtaggccaccagcatgacagcacccagcaactttctgcacaggtgctcntggttggngccttcggccaa

SEQ ID NO: 35 - DNA, 525 bp, Homo sapiens
  SITE (293): n equals a,t,g, or c
  SITE (386): n equals a,t,g, or c
  SITE (396): n equals a,t,g, or c
  SITE (422): n equals a,t,g, or c
  SITE (433): n equals a,t,g, or c
gaaggtaccggtccggaattcccgggtcgacccacgcgtccggttcatgtgattaaaatgtctttgctttccaaaaagttttgcctgagattacttcaaatcgcctggctggggtgggatttggagagggggcttcttgctgccttctgggcacagcgcctcagggccgggcacagggctggaggcacggggtgttggggggcttggcacttctctgggtcctggaggggctccttggcctctgtgggccccgttcccccgaatgtctctgtctcccagcccttttrgtttgnttctgcatcatgtctcgcctctcctgggcaccctgtccccccttctcctcttatctgctctgacgggcgctctctcactccctgccctcattnccaacatcgngtcctcacttcctggctcttcagganctctccctcanctctctgtcccccgcttgggtttctcctctctatcttcctttccttcttttcaaaacccccaattccaaggccccccttcccaagggttttt

SEQ ID NO: 36 - DNA, 1973 bp, Homo sapiens
  SITE (5): n equals a,t,g, or c
caggnccggtactgtcatgggggctttggctacctgttgtcacggagtctcctgcttcgtctgcggcmacatctggatggctgccgaggagacattctcagtgcccgtcctgacgagtggcttggacgctgcytcattgactctctgggcgtcggctgtgtctcacagcaccaggggcagcagtatcgctcatttgaactggccaaaaatagggaccctgagaaggaagggagctcggctttcctgagtgccttcgccgtgcaccctgtctccgaagtaccctcatgtaccggctccacaaacgcttcagcgctctggagttggagcgggcttacagtgaaatagaacaactgcaggctcagatccggaacctgaccgtgctgacccccgaagagggcagggctgagctggcccgttgggctccctgctcctttcacaccacactctcgctttgaggtgctgggctgggactacttcacagagcagcacaccttctcctgtgcagatggggctcccaagtgcccactacagggggctagcagggcggacgtgggtgatgcgttggagactgccctggagcagctcaatcggcgctatcagccccgcctgcgcttccagaagcagcgactgctcaacggctatcggcgcttcgacccagcacggggcatggagtacaccctggacctgctgttggaatgtgtgacacagcgtgggcaccggcgggccctggctcgcagggtcagcctgctgcggccactgagccgggtggaaatcctacctatgccctatgtcactgaggccamccgagtgcagctggtgctgccactcctggtggctgaagctgctgcagccccggctttcctcgaggcstttgcagccaatgtcctggagccacgagaacatgcattgctcaccctgttgctggtctacgggccacgagaaggtggccgtggagctccagacccatttyttggggtgaaggctgcagcagcggagttagagcgacggtaccctgggacgaggctggcctggctcgctgtgcgagcagaggccccttcccaggtgcgactcatggacgtggtctcgaagaagcaccctgtggacactctcttcttccttaccaccgtgtggacaaggcctgggcccgaagtcctcaaccgctgtcgcatgaatgccatctctggctggcaggccttctttccagtccatttccaggagttcaatcctgccctgtcaccacagagatcacccccagggcccccgggggctggccctgaccccccctcccctcctggtgctgacccctcccggggggctcctataggggggagatttgaccggcaggcttctgcggagggctgcttctacaacgctgactacctggcggcccgagcccggctggcaggtgaactggcaggccaggaagaggaggaarccctggaagggctggaggtgatggatgttttcctccggttctcagggctccamctctttcgggccgtagagccagggctggtgcagaagttctccctgcgagactgcagcccacggctcagtgaagaactctaccaccgctgccgcctcagcaacctggaggggctagggggccgtgcccagctggctatggctctctttgagcaggagcaggccaatagcacttagcccgcctgggggccctaacctcattacctttcctttgtctgcctcagccccaggaagggcaaggcaagatggtggacagatagagaattgttgctgtattttttaaatatgaaaatgttattaaacatgtcttctgccaaactgtttttaggtctagggaaaattgagtaaggagaagaatccaaggaagggatggggatcgtcccgagggacccatgccttcccacctcttccctcccctctctcccctyccctkcccaktttccaatgacaaacggtgctgtcagaggatgattttaatccagcccaaa

SEQ ID NO: 37 - DNA, 3026 bp, Homo sapiens
ttgctgtctggcctgcttttgttgactctggcgattgcggtgttaaatacactcgtgccgctttggctcgcccaggaacacatgtccacatggcaggtaggcgttgtcagctcatcctattttaccggcaaccttgtcggtacattgctgacagggtatgtcattaagcgcattggctttaaccgcagctattatctggcctccttcatttttgccgctggctgtgccggccttggcctgatgattggattctggagctggttggcttggcgttttgtcgcgggcgtcggctgtgccatgatttgggtggttgttgagagcgcgctgatgtgcagtgggacgtcacgtaaccgtgggcgtttgcttgctgcgtatatgatggtttattacgtgggaacgtttttaggccagttactggtcagcaaagtttcaaccgagctgatgtccgtattgccgtgggttacaggtttgacgttggcagggatcttaccgctgttgtttacgcgtgtgctgaatcagcaggctgaaaaccatgattcgacgtcaattacgtcaatgctaaaactccgtcaggcgcggcttggcgtgaatggctgcattatctcaggaatcgttctgggatctctatatggcctgatgccgctgtacctcaatcacaaaggggtgagcaatgccagcattggtttctggatggcggtactggtcagtgcgggtatccttggacaatggccgattggacgtctggcggataagtttggtcgactgctggtgttgcgtgttcaggtctttgtcgtcattctcggcagtatcgcgatgcttagccaggcggcgatggccccagcgttattcatcctcggtgccgctggctttacgctatatccggtggcgatggcatgggcttgcgagaaagttgaacatcatcaactggtggcgatgaaccaggccttactgttgagctatactgtgggaagtctgcttggcccgtcatttaccgctatgctaatgcagaatttctccgataatttattgtttatcatgatcgccagcgtatcgtttatctatttgctgatgctgctgcgcaacgccggtcatacgccgaaacccgttgctcacgtgtaaatgaattcaagcagagtgtgaacttactgtttcacactctgcttttttgtttcttctatctgacttgctttattccaaattttattcgtttaaaaataaaatgtgcagcaggttataattttgcatttcgctatttccgcacttcttatttgccgcgcataatccctcgttttaccgatgcccctttaattttggcgaaggatttgtctatggctgggaatggtcaggaaaaacagttgcgatggtacaacattgcgctgatgtcttttatcactgtctggggtttggcacgttgttaataactatgccaccagggctggtgggtgtttttcatgggtgttatctttgcactctattcacaccttatgcgctaattgttggtcagttaggctcgccttcaaagatggaaggccgggtcagtacctggattaacacacgatgggacccggactggcttatctcgccgcgtggacctactgggtggtgcatattccctatctggccaaaaaccccaggcaattctgattgcgctcggttggcgatgaaaggcgacggttcgctaatcaaagaatattcagtcgtagcgttacaggggttaacgctggtgctgtttatcttctttatgtgggttgcttcacgcggtatgaaatcgctgaaaatcgtcggttctgtggcagggattgctatgtttgttatgtcactcctgtatgtggcgatgcggtaaccgcgcctgcaattactgaagtgcatattgcgaccacaaacattacctgggaaacgttcattcctcatatcgactttacctacattaccactatttcaatgctggttttcgcggttggcggagcagagaagatttctccttacgttaatcaaacgcgcaacccaggaaaagaatttccaaaagggatgttatgcctggcggtgatggttgcggtttgtgccattctgggctcgctggcgatggggatgatgtttgattcgcgtaatatcccggatgacttaatgaccaacggtcagtattacgcctttcagaagctgggcgagtattacaacatgggtaatactttaatggtgatttacgccattgcgaataccctgggacaagtagcggcgctggtattctcgattgatgccccgcttaaagtgctattaggtgatgctgacagcaaatatattccagccagtttatgtcgtaccaacgcttctggtacgcccgttaatggctattttctgaccctggtactggtggcgattctgattatgctgccgactctcggcattggtgatatgaacaatctctataaatggctgttgaaccttaattcggtagtgatgccgctgcgttatttatgggtatttgttgcatttattgcagtcgttcgcttggcgcagaaatataaaccagaatatgtctttattcgtaataagcctctggcaatgaccgtcgggatttggtgttttgcctttaccgcctttgcctgtttgacggggatcttcccgaaaatggaagccttcactgcagagtggaccttccagttggcgctgaatgttgcaacgccgtttgtgctggtaggattaggactgatattcccgctgctggcgcgtaaagcgaatagtaaataattattgtggtcggtgacgctgactctggcagatctgacccgtttttacataatcgagaaatgcgcgcaagccgcaggacatatactggcggtttggataatagatctggaagcctggacgctctgtgctccagtcttccagtacacattctaaacgaccagtatcaaggtactccttgatctgttcatagagcagatacccgataccagcacccatcaaaacggcctccagttcagcatcaacatcatccagaatgatatttcctgcgacagcaatttcca

SEQ ID NO: 38 - DNA, 372 bp, Homo sapiens
  SITE (196): n equals a,t,g, or c
tacaggataaaagaaaaaaagaaggaaattcacctaacagaacagtagccattttaaagtaaacaattcaatggcctgtagtatatttacaatgttgtacarcctctatctctgtctagtttcacgacattttcatctttccaaaggaagcccttgccctttaagcagttactctccattccttccttcccccagnttctggcaaccaccaatccatcttctgtctctggattacctagtctggatagttcatataaatggratcatacaatatgtgacatgtgaccttttggctgattccactcagcatrgtatctttagggttcatccatgtcatggcagcacgagaaccctgccaacgtgggataagca

SEQ ID NO: 39 - DNA, 451 bp, Homo sapiens
  SITE (376): n equals a,t,g, or c
  SITE (436): n equals a,t,g, or c
  SITE (437): n equals a,t,g, or c
gaattcggcacgagtgcaacctggacacgctatgggaaagagatctccatggtcaggatccccaacaggggctcagcccggtacctgacgaggaagtacaaccgcaacgagacctacatacgggagaacttcctggtmctagatgtcttctttgaggccctgacctctgaagccatggagcagcgagcagcctatggcctgtcagccctgctgggagacctcgggggacagatgggcctgttcattggggccagcatcctcacgttgctggagatcctcgactacatctatgaggtgtcctgggatcgactgaagcgggtatggaaggcgtcccaagacccccctgcggacctccactgggggcatctccactttngggcttcaagagctgaaggaacagagtccctgcccgaagccgggggccgaagtggagagnnggggggtcagcaag

SEQ ID NO: 40 - DNA, 1782 bp, Homo sapiens
gatctgttcaatgaaattattccattgggtcgcttaatccatatggttaatcagaagaaagatcgcctgcttaacgagtatctgtctccgctggatattaccgcggcacagtttaaggtgctctgctctatccgctgcgcggcgtgtattactccggttgaactgaaaaaggtattgtcggtcgacctgggagcactgacccgtatgctggatcgcctggtctgtaaaggctgggtggaaaggttgccgaacccgaatgacaagcgcggcgtactggtaaaacttaccaccggcggcgcggcaatatgtgaacaatgccatcaattagttggccaggacctgcaccaagaattaacaaaaaacctgacggcggacgaagtggcaacacttgagtatttgcttaagaaagtcctgccgtaaacaaaaaagaggtatgacgatgtccagacgcaatactgacgctattaccattcatagcattttggactggatcgaggacaacctggaatcgccactgtcactggagaaagtgtcagagcgttcgggttactccaaatggcacctgcaacggatgtttaaaaaagaaaccggtcattcattaggccaatacatccgcagccgtaagatgacggaaatcgcgcaaaagctgaaggaaagtaacgagccgatactctatctggcagaacgatatggcttcgagtcgcaacaaactctgacccgaaccttcaaaaattactttgatgttccgccgcataaataccggatgaccaatatgcagggcgaatcgcgctttttacatccattaaatcattacaacagctagttgaaaacgtgacaacgtcactgaggcaatcatgaaaccactttcatccgcaatagcagctgcgcttattctcttttccgcgcagggcgttgcggaacaaaccacgcagccagttgttacttcttgtgccaatgtcgtggttgttcccccatcgcaggaacacccaccgtttgatttaaatcacatgggtactggcagtgataagtcggatgcgctcggcgtgccctattataatcaacacgctatgtagtttgttctggccccgacatctcggggcttattaacttcccacctttaccgctttacgccaccgcaagccaaatacattgatatacagcccggtcataatgagcaccgcacctaaaaattgcagacccgttaagcgttcatccaacaatagtgccgcacttgccagtcctactacgggcaccagtaacgataacggtgcaacccgccaggtttcatagcgtcccagtaacgtcccccagatcccataaccaacaattgtcgccacaaacgccagatacatcagagacaagatggtggtcatatcgatagtaaccagactgtgaatcatggttgcggaaccatcgagaatcagcgaggcaacaaagaagggaatgattgggattaaagcgctccagattaccagcgacatcaccgccggacgcgttgagtgcgacatgatctttttattgaagatgttgccacacgcccaactaaatgctgccgccagggtcaacataaagccgagcatcgccacatgctgaccgttcagactatcttcgattaacaccagtacgccaaaaatcgctaaggcgatccccgccaattgtttgccatgcagtcgctccccgaaagtaaacgcgccaagcatgatagtaaaaaacgcctgtgcctgtaacaccagcgaagccagtccagcaggcataccgaagttaatggcacaaaaaagaaaa

SEQ ID NO: 41 - DNA, 577 bp, Homo sapiens
  SITE (101): n equals a,t,g, or c
  SITE (283): n equals a,t,g, or c
ccaatgtggcagaaacctctatcacaatcagcggcattgtgtatgtgatcgactgtggctttgtgaaactccgagcctacaatcccaggacagctattgantgcttggtggtggtgccagtctcccaggcatcagctaatcagcgagcaggacgtggtggtcgtagtcgctcgggaaaatgttatcgcctttatacagaggaagcctttgacaagttgcctcagtctacggttcctgagatgcagcgtagtaatttggcacctgtcatcctgcagctgaaagnactaggaattgacaatgtcctcaggttccacttcatgtcgccccctccagcacagtcgatggttcaagccttggagttactgtatgctctgggaggtctggacaaagactgtcgcctaactgaaccgcttggcatgagaattgcagagtttcctttgaatcccatgtttgccaaaatgctgcttgaatcaggaaacttcggctgttctcaggaaattctaagcatcgctgccatgatgcagatccrgaayatctttgtggtccccccaaaaccagaagtctcaaggagacccat

SEQ ID NO: 42 - DNA, 977 bp, Homo sapiens
  SITE (960): n equals a,t,g, or c
gggcggggcgcggcggctgtcagctgactgtggcggcggcggcctcgaggtgacaactgtctccgtcgcaggctccggcgggggcgcaggaggtcgcccggcgcgtcactgtcgggtcggcgagccacgggggccgccgcagcaccatggcgaccaccgtcagcactcagcgcgggccggtgtacatcggtgagctcccgcaggacttcctccgcatcacgcccacacagcagcagcggcaggtccagctggacgcccaggcggcccagcagctgcagtacggaggcgcagtgggcaccgtgggccgactgaacatcacggtggtacaggcaaagttggccaagaattacggcatgacccgcatggacccctactgccgactgcgcctgggctacgcggtgtacgagacgcccacggcacacaatggcgccaagaatccccgctggaataaggtcatccactgcacggtgcccccaggcgtggactctttctatctcgagatcttcgatgagagagccttctccatggacgaccgcattgcctggacccacatcaccatcccggagtccctgaggcagggcaaggtggaggacaagtggtacagcctgagcgggaggcagggggacgacaaggagggcatgatcaacctcgtcatgtcctacgcgctgcttccagctgccatggtgatgccaccccagcccgtggtcctgatgccaacagtgtaccagcagggcgttggctatgtgcccatcacagggatgcccgctgtctgtagccccggcatggtgcccgtggccctgcccccggccgccgtgaacgcccagccccgctgtagcgaggaggacctgaaagccatccaggacatgttccccaacatggaccaggaggtgatccgctcctgctggaarcccagcgagggaacaaggatgccgccatcaacttccttgctgcaagatgggngaagagccatagagcct

SEQ ID NO: 43 - DNA, 534 bp, Homo sapiens
  SITE (27): n equals a,t,g, or c
  SITE (443): n equals a,t,g, or c
  SITE (455): n equals a,t,g, or c
  SITE (486): n equals a,t,g, or c
gggttctgcaggtacggcccggattcncgggtcgaccacgcgtccggaccctgaagagcctgatggaggagagctggtcctggggggctcggacccggcacactacatcccacccctcaccttcgtgccagtcacggtccctgcctactggcagatccacatggagcgtgtgaaggtgggcccagggctgactctctgtgccaagggctgtgctgccatcctggatacgggcacgtccctcatcacaggacccactgaggagatccgggccctgcatgcagccattgggggaatccccttgctggctggggagtacatcatcctgtgctcggaaatcccaaagctccccgcagtctccttccttcttgggggggtctggtttaacctcacggcccatgattacgtcatccagactactcgaaatggcgtccgctctgcttgtncggtttccaagncctggatgtcctccgctgcaagggccttctngatctcggtgacgtcttctttgggaagtatgtagccgtctttgaccgc

SEQ ID NO: 44 - DNA, 645 bp, Homo sapiens
  SITE (644): n equals a,t,g, or c
gtgagattccattagaaaaggagaaccaagataaattagtgaagtttatgatccggatcggtgttttcagcattctttatctcgtaccactcttggttgtaattggatgctacttttatgagcaagcttaccggggcatctgggaaacaacgtggatacaagaacgctgcagagaatatcacattccatgtccatatcaggttactcaaatgagtcgtccagacttgattctctttctgatgaaatacctgatggctctcatagttggcattccctctgtattttgggttggaagcaaaaagacatgctttgaatgggccagtttttttcatggtcgtaggaaaaaagagatagtgaatgagagccgacaggtactccaggaacctgattttgctcagtctctcctgagggatccaaatactcctatcataagaaagtcaaggggaacttccactcaaggaacatccacccatgcttcttcaactcagctggctatggtggatgatcaaagaagcaaagcaggaagcatccacagcaaagtgagcagctaccacggcagcctycacagatcacgtgrtggcaggtacacgccctgcagttacagaggawtggagggagctactcatggcattcaggttacagtna

SEQ ID NO: 45 - DNA, 465 bp, Homo sapiens
  SITE (60): n equals a,t,g, or c
  SITE (62): n equals a,t,g, or c
  SITE (64): n equals a,t,g, or c
  SITE (426): n equals a,t,g, or c
  SITE (463): n equals a,t,g, or c
acgccgtgcaggtaccgggctccggaattccggggtcgactcacgcggtccgcgacgatncnangattctgcatcaggaacccctcgcgcttaatcctttgatatttttcaagccatgagaaaaatgaagtggacttaccagggtccctccagtgacctagtggatgttcttacaggactgccgtgtgccactggctgtggcttccctggtcctgtgcttggccaccgggagctggcatctccaaaatagagcctccttagcctgtgcaggtgggctgtcttccaaagtcaccacaccagtgacttgtgctgtgcggacctttcctcaccagggaccactgggcttgctcctgtgggctagaagtcacaattatagggcttcatttgcaagagccagcattttgagtttcttcttggggcaacttnccactgtggcatgtgttgaccttaaattgttttgtgnca

SEQ ID NO: 46 - DNA, 1019 bp, Homo sapiens
ggcacgagcctggccctcctggaaagagtcctggaaagacaaccttcaggtccagccctggagctggaggagtggagccccactctgaagacgcagcctttctccaggttctgtctctcccattctgattcttgacaccagatgcaggatggtgtcctctccctgcacgccggcaagctcacggacttgctcccgtatcctgggactgagccttgggactgcagccctgtttgctgctggggccaacgtggcactcctccttcctaactgggatgtcacctacctgttgaggggcctccttggcaggcatgccatgctgggaactgggctctggggaggaggcctcatggtactcactgcagctatcctcatctccttgatgggctggagatacggctgcttcagtaagagtgggctctgtcgaagcgtgcttactgctctgttgtcaggtggcctggctttacttggagccctgatttgctttgtcacttctggagttgctctgaaagatggtcctttttgcatgtttgatgtttcatccttcaatcagacacaagcttggaaatatggttacccattcaaagacctgcatataggaattatctgtatgaccgttcgctctggaactccgtctgcctggagccctctgcagctgttgtctggcacgtgtccctcttctccgcccttctgtgcatcagcctgctccagcttctcctggtggtcgttcatgtcatcaacagcctcctgggccttttctgcagcctctgcgagaagtgacaggcagaaccttcacttgcaagcatgggtgttttcatcatcggctgtcttgaatcctttctacaaggagtgggtacgaattataaacaaacttcccctttaggtatccctggagtaataatgacaacaaaattcactgcaggtcggtggaatgatagaatgcattttaaatcacattgtaaacttccaggtgatccatggataggataaataactaagttattataaaaaaaaaaaaaaaa

SEQ ID NO: 47 - DNA, 629 bp, Homo sapiens
  SITE (609): n equals a,t,g, or c
  SITE (619): n equals a,t,g, or c
ggcacgagagcaaaacgaccactgaaaacaacgccggtggcaaaatatccaaagaaagggtcccaagcggtacatcgtcatagccggaaacagtcagagccaccagccaatgatcttttcaatgctgcgaaactgccaaaagtgacatgcagggatgtccttcctgagatccgtgctatctgcattgaggaaattgggtgttggatgcaaagctacagcacgtctttcctcaccgacagctatttaaaatatattggttggactctgcatgataagcaccgagaagtccgcgtgaagtgcgtgaaggctctgaaagggctgtacggtaaccgggacctgaccgcacgcctggagctcttcactggcygcttcaaggactggatggtttccatgatcrtggacagagagtacagtgtggcagtggaggccgtcagattactgatacttatccttaaacttttctaccctgagtgcgagataagaacgatgggtggaagagagcaacgccagagcccaggygcccagaggactttcttccagcttctgctgtccttctttgtggagagcaaggtgacatacacagagagaactcttggctgttgtgcatangactacaatnggcttgggtt

SEQ ID NO: 48 - DNA, 2054 bp, Homo sapiens
  SITE (10): n equals a,t,g, or c
  SITE (13): n equals a,t,g, or c
  SITE (1982): n equals a,t,g, or c
  SITE (1989): n equals a,t,g, or c
  SITE (2041): n equals a,t,g, or c
ggcacgagcnacnccaagcggaagtgacgttagtgtccgccggagtgtcgttggtgtgttgcgcgactggccttgagggagagctggggcctgctcccggagagatacggctatgtcgatcgaaatcgaatcttcggatgtgatccgccttattatgcagtacttgaaggagaacagtttacatcgggcgttagcaccttgcaggaggagactactgtgtctctgaatactgtggacagcattgagagttttgtggctgacattaacagtggccattgggatactgtgttgcaggctatacagtctctgaaattgccagacaaaaccctcattgacctctatgaacaggttgttctggaattgatagagctccgtgaattgggtgctgccaggtcacttttgagacagactgatcccatgatcatgttaaaacaaacacagccagagcgatatattcatctggagaaccttttggccaggtcttactttgatcctcgtgaggcatacccagatggaagtagcaaagaaaagagaagagcagcaattgcccaggccttagctggcgaagtcagtgtggtgcctccatctcgtctcatggcattgctgggacaggcactgaagtggcagcagcatcagggattgcttcytcctggtatgaccatagatttgtttcgaggcaaggcagctgtcaaagatgtggaagaagaaaagtttcctacacarctgagcaggcatattaagtttggtcagaaatcacatgtggagtgtgctcgattttctccagatggtcagtatttggtcactgggtctgttgatggattcattgaagtatggaactttactactggaaaaatcagaaaggatcttaagtaccaggcccaagataactttatgatgatggatgatgctgtcctctgcatgtgtttcagcagagatacagaaatgttagcaactggggcccaagatggaaaaatcaaggtgtggaagattcagagtggacaatgtttaaggagatttgagagggcacacagtaagggtgtcacctgtctaagcttttctaaggatagcagtcagatccttagtgcttcttttgaccagacaattagaattcatggtttaaaatctgggaaaaccctgaaggaatttcgtggccattcctcctttgttaacgaagcaacatttacacaagatggacattacattattagtgcatcctctgatggcactgtaaaggttaagtatttgctatcagtttattttgggatgtctaccccatctttgtcctttgaggagttttcagtggtgataatgggaatgattgtgctgtagtaaacctctttcctggctattttagctgtaattgaggtgagtctgagacaacaacagtattctgtgggtaattcccattggccttgggaccccaatctcmaaccttttcaayccaaacaamctttaycatgtgtaggaaaagaggaagggkgaagagycctaaacttaagccatcccccattcacagatacacatggtggttaaatctgttttgccataggtatggtccacctgctaacagtcaaattcacgaaagtctcagtggcctaataaatagatctcttttttgttgcacagcstcactgcactcctggtccccagatttagggccttcctagtagcatttatagaggaataggagaggtgttgagtaaaactaagccttctcctagatagttatttaataagtaatttgctgaaagtaatggatcttcagtacctttaaagatttagttatttgaagagaggttctcatttcctagaaaagatatgagaaacccaaatagaaaattattagagatctttgagacactctatttacattctgggacccaatctttttgaattgtcttatatgagtgagtactttgtggcagagctctagacatttaataaaacatttaatacaaatatctagatattttaggtacatntttaagnatctaaatttcagacagccagggtggtggcgtataccctattcccgctactngggagcttaggtg

SEQ ID NO: 49 - DNA, 1701 bp, Homo sapiens
ggccttacggcacagtagagagcttccagggctggctggcgtgggatacccgtaccacagaaatgcagggaccattgcttcttccaggcctctgctttctgctgagcctctttggagctgtgactcagaaaaccaaaacttcctgtgcctcctcctggcggccctcacttttctcctgtgtaaagccatccagaacaccagcacctcactgcatctgcagctctcgctctgcctcttcctggcccacctcctcttcctcgtggggattgatcgaactgaacccaaggtgctgtgctccatcatcgccggtgctttgcactatctctacctggccgccttcacctggatgctgctggagggtgtgcacctcttcctcactgcacggaacctgacagtggtcaactactcaagcatcaatagactcatgaagtggatcatgttcccagtcggctatggcgttcccgctgtgactgtggccatttctgcagcctcctggcctcacctttatggaactgctgatcgatgctggctccacctggaccagggattcatgtggagtttccttggcccagtctgtgccattttctctgcgaatttagtattgtttatcttggtcttttggattttgaaaagaaaactttcctccctcaatagtgaagtgtcaaccatccagaacacaaggatgctggctttcaaagcaacagctcagctcttcatcctgggctgcacatggtgtctgggcttgctacaggtgggtccagctgcccaggtcatggcctacctcttcaccatcatcaacagcctccaaggcttcttcatcttcttggtctactgcctcctcagccagcaggttcagaaacaatatcaaaagtggtttagagagatcgtaaaatcaaaatctgagtctgagacatacacactttccagcaagatgggtcctgactcaaaacccagtgagggggatgtttttccaggacaagtgaagagaaaatattaaaactagaatattcaactccatatggaaaatcatatccatggatctctttggcattatgaagaatgaagctaaggaaaagggaattcattaaacatatcatccttggagaggaagtaatcaacctttacttcccaagctgtttgttctccacaataggctctcaacaaatgtgtgggaagggagggatgtgtgcatcctggaagagaagcaggctgtccctgaaggttctcaaaggttcagtgggaagaactcacgtgctcagcaaagctattgatgatgaccaagtgagagtaattctcctggcagaacatccgggcctcatcccatgacttggtgcttggggagaagtagtaacacttgccctcaaagggcagccagccttcaggacagagatggggtcttgctatgttgccccggctggtctcaaactcctgtcctcaagcgatcctcccacctcggcctcccaaagtatcaagactacagatgcacaccactgcagctggcccaaacctccactttaacaaccacttatcagtctcctgttggaccctgtaccatgccttgggtttgtgatccaagtctaaataaaacctgggctttgggtagaaaggtgaggagattgggagcccacagtccactcccagtttctcaagcaccagcttttgtaactcagggactttgcacctaaaaaaaaaaaaaaaaaa

SEQ ID NO: 50 - DNA, 991 bp, Homo sapiens
ggtggtcaggaagtggaaacgaaacgctttgataaagtcagcaaccgaatgcgtcttcaggggatgaaaatggtttcagcctcttccatctctgatccgatcattcagctgatcgcctctttggcgctggcgtttgttctgtatgcggcgagcttcccaagtgtcatggatagcctgactgccggtacgattaccgttgttttctcttcaatgattgcactgatgcgtccgctgaaatcgctgaccaacgttaacgcccagttccagcgcggtatggcggcttgtcagacgctgtttaccattctggacagtgagcaggagaaagatgaaggtaagcgcgtgatcgagcgtgcgactggcgacgtggaattccgcaatgtcacctttacttatccgggacgtgacgtacctgcattgcgtaacatcaacctgaaaattccggcagggaagacggttgctctggttggacgctctggttcgggtaaatcaaccatcgccagcctgatcacgcgtttttacgatattgatgaaggcgaaatcctgatggatggtcacgatctgcgcgagtataccctggcgtcgttacgtaaccaggttgctctggtgtcgcagaatgtccatctgtttaacgatacggttgctaacaacattgttacgcacggactgaacagtacagccgtgagcaaattgaagaagcggcgcgtatggcctacgccatggacttcatcaataagatggataacggtctcgatacagtgattggtgaaaacggcgtgctgctctctggcggtcagcgtcagcgtattgctatcgctcgagccttgttgcgtgatagcccgattctgattctggacgaagctacctcggctctggataccgaatccgaacgtgcgattcaggcggcactggatgagttgcagaaaaaccgtacctctctggtgattgcccaccgcttgtctaccattgaaaaggcagacgaaatcgtggtcgt

SEQ ID NO: 51 - DNA, 532 bp, Homo sapiens
ttcctaaacaaatcctttcacagggaccgacggcacttgataatgtgacaaaaaccagcctcttccaccccactgcagtgacttttgccggaaagtggagcagtgggcacggccaaccttgtcgttcatcaatgccgcccctggcagtatctgaggatcggtggcagccatgctccccctgccccagccgctccttcccccccacgctaatctgcatggtgtgggcgcccttgggacccccgaggactgattgtctgaccttgcttcacacgcccagtaaggactcccccaagatgtcgctcgagtggctggtggcctggagctggtcgctgggatggcctgarggactgcatcgccaccggcatccagtccgtgcgggactgcgacamcamcgctgtcatcactgtggctgcctyctggtcctcttctgtggtamtgttatcactgggcaggagcagccccggccytamgtytycgtcaactccctcatgcaggctgccgatgccaaacggggctgcagaatggctaacgt

SEQ ID NO: 52 - DNA, 580 bp, Homo sapiens
  SITE (522): n equals a,t,g, or c
  SITE (538): n equals a,t,g, or c
  SITE (569): n equals a,t,g, or c
  SITE (570): n equals a,t,g, or c
gcgtgcttctgcacttcagcctgggtgacagagtgagacttcatcagagagagagagagagagagagaagcaagcgctcagtgctgagcttacctgggccaggtagagggatgtggccacgggcaggaagtggctgtgggaatctggcgctacaggttcctctgccaccccacttcctccacacctgacctcctgtccccacctgtgccccatcccttgctcccacctcctcgtgacctctgatgggggaggcttctgcagccccccaccccagtcccaggcaggggtgcaggcccccagaacacccagttgggaatcactgcttccctctcactgccatctttgtgcctccctggggtcccccatctctgaggctcctcatctctggttttgggtgtctctctgctctyctcaccttgggtttctggacagtatgtgtcarggccccaagggggtgtccmagtgaggacagaraargaagtgcagargcaggaccttyctttgcacctcaactcatccatncactccccctctgcanaagtggggagggggaaagaaggggggtcttnngttaaattaa

SEQ ID NO: 53 - DNA, 1444 bp, Homo sapiens
tccggaagatttcaaatactgcccgcaaagctcgcgctacaaaaccgggttgggaaccagtcggttgatggaagttgaacaggtgctggagtcggcgcgcaaagcrawagcggacaggatcgacgcgcttctgtatgggcgcggcgtggaagawtccccacgaacgcgatatgccgtacctggaacaaatggtgcagggggtaaaagcgatggggctggaggcgtgtatgacgctgggcacgttgagtgaatctcaggcgcasgcctcgcgaacgccgggctggattactacaaccacaacctggacacctcgccggagttttacggcaatatcatcaccacacgcacttatcaggaacgcctcgatacgctggaaaaagtgcgcgatgccgggatcaaagtctgttctggcggcattgtgggcttaggcgaaacggtaaaagatcgcgccggattattgctgcaactggcaaacctgccgacgccgccggaaagcgtgccaatcaacatgctggtgaaggtgaaaggcacgccgcttgccgataacgatgatgtcgatgcctttgattttattcgcaccattgcggtcgcgcggatcatgatgccaacctcttacgtgcgcctttctgccggacgcgagcagatgaacgaacagactcaggcgatgtgctttatggcaggcgcaaactcgattttctacggttgcaaactgctgaccacgccgaatccggaagaagataaagacctgcaactgttccgcaaactggggctaaatccgcarcaaactgccgtgctggcaggggataacgaacaacagcaacgtcttgaacaggcgctgatgaccccggacaccgacgaatattacaacgcggcagcattatgagctggcaggagaaaatcaacgcggcgctcgatgcgcggcgtgctgccgatgccctgcgtcgccgttatccggtggcgcaaggagccggacgctggctggtggcggatgatcgccagtatctgaacttttccagtaacgattatttaggtttaagccatcatccgcaaattatccgtgcctggcagcagggggcggagcaatttggcatcggtagcggcggctccggtcacgtcagcggttatagcgtggtgcatcaggcactggaagaagagctggccgagtggcttggctattcgcgggcactgctgtttatctctggtttcgccgctaatcaggcagttattgccgcgatgatggcgaaagaggaccgtattgctgccgaccggcttagccatgcctcattgctggaagctgccagtttaagcccgtcgcagcttcgccgttttgctcataacgatgtcactcatttggcgcgattgcttgcttccccctgtccggggcagcaaatggtggtgacagaaggcgtgttcagcatggacggcgatagtgcgccactggcgg

SEQ ID NO: 54 - DNA, 600 bp, Homo sapiens
aattcggcacgagtgactcatcctcctggaaagaaatttcaagggataaagcaccatggatctaacttatattcccgaagacctatccagttgtccaaaatttgtaaataaatcctgtcctcccaccaaccgctcttttcatgtccaggtgataatgtattcggttatgactggagccatgattatcactattcggaaacttggttataatggtttccatatcgcatttcaaacagcttcactctcccacaaactttctgatcctctccatggcaaccacggactttctgctgggttttgtcattatgccatacagcataatgcgatcagtggagagttgctggtactttggggatggcttttgtaaattccacacaagctttgacatgatgctcagactgacctccattttccacctctgttccattgctattgaccgattttatgccgtgtgttaccctttacattacacaaccaaaatgacgaactccaccataaagcaactgctggcattttgctggtcagttcctgctcttttttcttttggtttaggtgttttttcactgccccctttgtgttttcaggcacatggctgatgac

SEQ ID NO: 55 - DNA, 562 bp, Homo sapiens
  SITE (454): n equals a,t,g, or c
  SITE (468): n equals a,t,g, or c
  SITE (511): n equals a,t,g, or c
  SITE (562): n equals a,t,g, or c
gtcccagtccccttggtctctgtgacagtgggcggggccggccctcctaggatctgacggcgcaggtcctccccttctgtgtcctgcagatggacacccgctccgggagccagtgttccgtcaccccagaagccatactcaataatgaaaagctggtcttgccgccccgcatctccagagtgaacggctggtcgttacccctgcactacttccaggtggtgacctgggctgtcttcgtgggcctttcctcggccaccttcgggatcttcattcccttcctgcctcacgcgtggaaatacattgcctacgtggtatccttttcatcgtggcatggtctaagcgggaagggttcctggargaacttgcgatggacctggctgtggggtctgggccatggctgcccggtggcaccagtcacctgccctgggccagactatgtcccctgarcctgcangtgggcccagtggncactcatgctctgtgcaacccctgcttaaggtcaggacagganaacgttggctgaaggggctccggaaaaggaatctgtcaggaaggacagcan

SEQ ID NO: 56 - DNA, 583 bp, Homo sapiens
  SITE (549): n equals a,t,g, or c
gtaaatgctggacaagtagtcacaggaaatctggccccacatttccttgccctgtgtaagcccaattatacagcacttggatgtcagcagtatacacaattcatcagtggggaagaggcctgtactggcaacccagatctcatcatgagagcccgaaaaacctttccatccaaagaagcagctctcagtgtctatgcagctatgtatctgaccatgtacatcaccaacacaatcaaagccaagggaaccagacttgctaagccagttctatgcttgggcttaatgtgtttggcatttcttactggactcaacagagtagcagaatatcgaaatcattggtcagatgttatagcaggctttctggttggaatatctatagcagtatttctggttgtgtgcgtggtgaataatttcaaagggagacaagcagaaaatgagcatatacacatggataatctggsacasatgccaatgatcagcattccccgagtagaaagtccyytggraaagaaccccatcactsccttcgcagaagtcacatgatatcgnagcagatggkttttcactgcattggacatcatcc

SEQ ID NO: 57 - DNA, 580 bp, Homo sapiens
  SITE (140): n equals a,t,g, or c
  SITE (368): n equals a,t,g, or c
  SITE (571): n equals a,t,g, or c
  SITE (574): n equals a,t,g, or c
ggcagagcgtggccgccgcacaagctgcgctcgtctctcggctggggagctccgtgtcgcaccgggttcttgggctggccgtgtccttctccctcggtcgccactggcccatgagtccccatggcgacggcaggggccangcccaggggcgggcagtccgagtggggctgcggcgctccgggggcatccgcggcggcgtggcggtgttcgcgcctggccgcagtgttcaccttcaccctgcccccttcggtaccggggggagactccggggaactgatcacagccgcacatgagcttggagttgcccatcctcctggctatcctttgttcactctggtggctaaactggcaattacactgtttccttntggttcaattgcctaccgcgtcaatcttctctgtggcttatttggagcagtagctgcatcattactttttttcaccgttttcaggctttctggctcatctgctggaggaatccttgctgcgggggtgttttcattttctcgtctaacatggcagtggtccattgcagcagaggttttagcttaaaacaatctctttgtggggntgntatggg

SEQ ID NO: 58 - DNA, 807 bp, Homo sapiens
  SITE (55): n equals a,t,g, or c
  SITE (684): n equals a,t,g, or c
  SITE (703): n equals a,t,g, or c
  SITE (708): n equals a,t,g, or c
  SITE (757): n equals a,t,g, or c
  SITE (771): n equals a,t,g, or c
  SITE (775): n equals a,t,g, or c
  SITE (803): n equals a,t,g, or c
gggccccatcccccgggctgcaggtccttcttccccctcctgacctacttcttcntggggggtgttcaccagatggtgccaggtacctttgccgttatcagcatcctggtgggtaacatctgtctgcagctggccccagagtcgaaattccaggtcttcaacaatgccaccaatgagagctatgtggacacagcagccatggaggctgagaggctgcacgtgtcagctacgctagcctgcctcaccgycatcatccagatgggtctgggcttcatgcagtttggctttgtggccatctacctctccgagtccttcatccggggcttcatgacggccgccggcctgcagatcctgatttcggtgctcaagtacatcttcggtgctggccaagagccaacacattcttggcccaggagcattgcttttctgtgaattcattatgccatctggctgccaatggaactcaaaacttggaaggcgaaggacaatgttatctgggattcaccgtgcccagcacccgaagtgccaaattccaggaggacaagagccttagccaatgacaactcactctcccctactccaccttctttcaagtccagctcagcccaggaggtgggagaaggtcacagagcctcagggaattttcaagtcagagtccccttttgaaccaagtattctaagatnccctgaggacttgatgaantgatnccttacccccccaaggtaattatttaaccccccagaaccaagcctcaanaacttgaaaggggnattngttggaccccaatgaacctggaagtttnaggg

SEQ ID NO: 59 - DNA, 452 bp, Homo sapiens
  SITE (442): n equals a,t,g, or c
  SITE (447): n equals a,t,g, or c
ggcagagaaagaatcagccttactaaacaagctgtccatccttgcctccaaactggccccagccatgaagactcagaagctaagataccgacggtgttcctctgaacttcttccaatggctaaaagctacaagcgcctcaratataaaagactcctggacggattttcatccagcacagagcagctgaatccatatttggcagctagtggatgggataagaggcctaacagtaagcccatggcactttattctctcgaatccatcaagatgaccttcatagatttgagcaacaagatgccgtccctgctgtttggttctgaaatcttcccagtaatcctttcatgtgaaatcatccagctcagattgcacgatgagtcctcaaggacttttccggagcactgtgctcccggcaaggcttgccttaggagaggcctccagtgnccgtntaaac

SEQ ID NO: 60 - DNA, 1421 bp, Homo sapiens
ctgctttcttatctcacgatttaacagggaatagttcaggctgtgttgatgtatcaaacccgcagaacataccaaaacagcaataacattgcggtagtgcatcttttaaaaccagcgtggcgttaaccgattcaccaggaataatgaatggaacttttgacccaattgctgcaagccctgtgggcgcaggattttgaaaccctggccaatccatcgatgattggcatgttgtattttgtcttgtttgtaattttgttccttgaaaacggcttgcttccggcggcctttttaccgggcgacagtttactggtattggtcggcgtgttgattgcgaaaggcgcgatgggctatccgcaaacgattctgctgctgaccgttgccgccagcctcggctgctgggtcagctatattcaggggcgatggctgggcaatacccgcaccgtacaaaactggctatctcatttacccgcgcattatcatcaacgcgcacaccatctttttcataaacacggtttatcggcgctgttaattggtcgctttattgcgtttgtcagaacactgctgccgacgattgccgggttatcagggctgaataacgcgcgctttcagtttttcaactggatgagcggtctgctgtgggtattgatcctgacaactctgggttacatgctcggcaaaacgccggtatttttaaagtacgaggaccagctgatgtcatgcctgatgctgctcccggtggtgctgctggtgtttggcctggcaggttctctggtcgtgttatggaaaaagaaatatggaaatcgggggtaagggatgcaaatacctcgcatgtcgcttcgccagctagcctggtccggcgctgttttacttctggtcggcacgctgttgctggcctggtccgcggttcgccagcaagagtctacgctggcgattcgtgccgttcatcaaggcacaacgatgccagacggtttttcaatctggcatcaccttgacgctcatggcattcctttcaaaagtatcacccccaaaaacgacactctgttaattacatttgactccagcgaccagagcgccgccgcaaaagcggtcctcgacagaacattgccccatggctacatcattgcgcagcaggacaataacagtcaggctatgcagtggctgacccggttacgggataactctcatcgcttcggataacttcctgttatccgaaacatatcactcactttggtgatttcaccgtaactgtctatgattaatgaggcggtggttaacactaccgcttcgttgtctggacaatcgttcctttgtaataggtccgaatcacaatggaaggttcaagaatgaaataccgcatcgctttagctgtttctctctttgctcttagtgccggtacccaattcgccctatagtgagtcgta

SEQ ID NO: 61 - DNA, 374 bp, Homo sapiens
  SITE (343): n equals a,t,g, or c
  SITE (360): n equals a,t,g, or c
  SITE (373): n equals a,t,g, or c
gtgagaactagtggactgtaatgtgtcagtaacttttcccatctggtgacaggttaattcaggttatggatattttgggtcagccttctacttgtcccctttcctctgtaattcccatagagataggtcctttgactgaggaacatgtgttcttcatttctcctgaatctcctataaacctactggtgagagacctgctgtgcaacttaatagctactatattttgtactgtggatggaagtgtctgtgggagccttttggggaaaaggcacctggatttgggatactatatacttctggaaagaaaagaggtatggccagagatgggcatctcatacgtgcnggaaaatccccacaagntcaaacaagtcant

SEQ ID NO: 62 - DNA, 567 bp, Homo sapiens
  SITE (258): n equals a,t,g, or c
  SITE (459): n equals a,t,g, or c
ggggattggagagttgaaagggttttcgggagcatstatttctctcagttctcctgctttgcctctggctactgcaggctgctgccttgcatttggtgaaagcctcgygctttctaggaggggatttctttcagctttcctgccttacccccagtgtgtaatggggactgccttgcaatggatgaacctcacatgccttggagaatccctcttgcttctcctgccttgcttcctgtgctcagtgggctactttcttgnactttgggaagacctggtgtacctggggagggtatttctcagttctcctamcctggcaccagctttcagtgtacgactcccatccactcaatggaggctgggtgggtacagactagttctattcctggggtaccttgtgattctactctgttatgccaacccatatacaatcatccaaaatttgtttaaagataggctggnttctcccttcctcttctgtgctccttccaacatgtccctaggaacaaaagcagctgtgggactcttctctctaggaagagcttgatccttttggaaatgtagttaatt

SEQ ID NO: 63 - DNA, 544 bp, Homo sapiens
  SITE (534): n equals a,t,g, or c
gagaaacatacgttgaaagaaaggcaaataaaattagctccttcagtttgaaagaattttttcaaatgcaataaacaagagactaaattatagcaccacattttcgggtgtgctggggttagctgatgcctgccatgagttcagagttggatggtgcttttctgttactatacctaaggaagacgataatagcgatgtgggctgtatttttagttccctataataagcatgggrttgtttgtctattttcttttcaaaagtgtgtcagatttccctcatgctctgtggtttgtttcctgcttaaattcctgacaatctgctttaaacaacattgctatatttgtgkccagaggatacaaaaaagttttaaaaatagaacaacatacattccacygkaagcyttgaaaaaacttcccggaattatggcyttgaagttcaccaagacatggaggccatattatggygtgkcatgttggcccttttgtgagtggaatcatwctgacaggcatgaggcttcctacaccgggtaatggnatatagagct

SEQ ID NO: 64 - DNA, 610 bp, Homo sapiens
  SITE (5): n equals a,t,g, or c
  SITE (66): n equals a,t,g, or c
  SITE (68): n equals a,t,g, or c
  SITE (574): n equals a,t,g, or c
  SITE (606): n equals a,t,g, or c
gccgncacgggcctgcccctggtggggcagcattctgctctccaccgtggccttatcggggtgccngntccaacggctttggcagcctaccagcactacatcctggccaaggtggaaaatttgcagccagaaataaaaactattgccaggcatcttaaccaagaagttgcagttcgtgcaaatcagttggggtggtccaaaagagatgccaggctcacttatctaaagaatatgaggaggctaatttcagagctatatgtgcgagataactgccaccctttcaaagccactgtgttggtttggattcagcttccaatgtggatcttcatgtcttttgctctccggaatttaagcacgggggcagcacattcagaaggtttttctgttcaggaacagttagctactggtggaattctgtggtttcctgacctcactgcacctgactccacttggattctgcctatctctgttggcgtcatcaatttgttaatagtggagatttgtgctctacaaaaaattggaatgtctcgttttcagacgtatattaacgtactttgtccgtgcaatgtcggtnttgatgataccaattgctgcaacggtaccctnatca

SEQ ID NO: 65 - DNA, 1122 bp, Homo sapiens
gactggtgaccgatgccgaatctattctgcactttgccgagattggggtggtgctgatgctgtttattatcggcctcgaactcgatccacaaaggctgtggaagctgcgtgcggcagtgttcggctgtggcgcattgcagatggtgatttgcggcggcctgctggggctgttctgcatgttacttgggctgcgctggcaggtcgcggaattgatcggcatgacgctggcgctctcctctacggcgattgccatgcaggcgatgaatgaacgcaatctgatggtgacgcaaatgggtcgcagtgcctttgcggtgctgctgttccaggatatcgcggcgatcccgctggtggcgatgattccgctactggcaacgagcagtgcctcgacgacgatgggcgcatttgctctctcggcgttaaaagtggcgggtgcgctggtgctggtggtattgctggggcgctatgtcacgcgtccggcgctgcgttttgtagcccgctctggcttgcgggaagtgtttagtgccgtggcgttattcctcgtgtttggctttggtttgctgctggaagaggtcggcttgtcgatggcgatgggcgcgtttctggcgggcgtactgctggcaagctcggaataccgtcatgcgctggagagcgatatcgaaccatttaaaggtttgctgttggggctgtttttcatcggtgttggcatgtcgatagactttggcacgctgcttgaaaacccattgcgcattgtcattttgctgctcggtttcctcatcatcaaaatcgccatgctgtggctgattgcccgaccgttgcaagtgccaaataaacagcgtcgttggtttgcggtgttgttagggcagggcagtgagtttgcctttgtggtatttggcgcggcgcagatggcgaatgtgctggagccggagtgggcgaaatcgctgaccctggcggtggcgctgtcgatggcagcaacgccgattctgctggtgatcctcaatcgccttgagcaatcttctactgaggaagcgcgtgaagccgatgagatcgacgaagacagccgcgcgtgattatcgccggattcggtcgttttgggcagattaccggacgtttactgctctccag

SEQ ID NO: 66 - DNA, 1542 bp, Homo sapiens
tagtggaggcccactattggatcgtaaaggcccacgcctgatgctgggactggggatgttcttctggtcactgttccaggcaatgtctggcatggtgcacaactttacgcagttcgtgttggtgcgtatcggtatggggattggtgaagcgccgatgaacccatgcggtgtaaaagtcattaacgactggttcaacatcaaagagcgcggacgcccgatgggcttcttcaacgcagcttctaccattggcgttgccgtaagcccaccgattctggcggcgatgatgctggtgatgggctggcgcgggatgtttattaccattggtgtactggggatttttctcgccatcggctggtatatgctctatcgcaaccgcgagcacgtagaactgactgccgttgagcaagcttatctcaatgcaggtagcgtcaatgcccgccgagatccgctcagttttgccgaatggcgcagcctgttccgtaaccgtacaatgtggggaatgatgctcggattcagtggcatcaactacactgcgtggctgtatctggcctggcttcctggttacctgcaaacagcctataacctggatttaaaaagcacagggttgatggcggctatccctttcctgtttggggctgccgggatgctggtcaacggttacgttaccgactggctggtcaaagggggaatggctccgattaaaagccgtaagatctgcattattgccgggatgttctgttctgccgcctttacgctgatagtaccacaagcgacaacatccatgacggcggttctgctgattggcatggcactgttctgtattcactttgccggaacatcctgctggggcttgatccacgtcgcagttgcttctcgcatgactgcgtcggtgggcagtatccagaactttgccagcttcatctgcgcctcttttgcgccgatcattactggttttattgttgataccacccactcattccgtctggcactaatcatctgcggttgcgtcaccgcagcgggggcactggcgtacatcttcctggttcgtcagccgatcaacgacccacgtaaagattaatctccttatgcccgataacattttgcttatcgggcattttcatggcgattaaaatgtttcccagttctcctcgctatctgccacggccattttacgcggcgcagctggcgtcacggtttttaccacagccgatgtttcacgctgctgttgctgaatccggaacactgccactgcttcggtcaggcgactggcctgctcttccagcgcggcggcggcagcggcagactcttccaccagcgcggcgttctgttgagttacccggtccatctcagcaaccgctaagccaacctgatcgataccacggctctgctcatcagaagcagaagcaatttcgcccataatgtccgtcacgcgggtcacggcgctgacaatctccgccattgtttccccggcgctttcgaccagcgtagagccaacatccactttccccaccgagtcttcaatcaggcttccaatgtgccaat

SEQ ID NO: 67 - DNA, 1489 bp, Homo sapiens
ggtattaatcagcagcatgctggtgctggcgatggccttaccactgtttattaccgtttccccttttgcgggcggcggcgatctgatcacccttatctatcttcttgccctgtttcgttttttctttgctctttccgggctggataccggaagtccgtttgcgggagtcggtgccagtcgcgagttgacgctcggcattctggtcgaaccaatgcttattctctcactgctggtattggcgctgatagcaggttccacgcatatcgagatgatcagcaatacgctggcgatgggctggaactcgccgctaaccaccgtactggcgttactggcctgtggttttgcctgcttcattgagatgggaaaaattccctttgatgttgctgaagcagaacaggaattacaggaaggcccgctgaccgaatattccggtgccgggctggcgctagcgaaatgggggctggggctgaaacaggtcgtgatggcatcactgtttgtggccctgtttctgccctttgggcgcgcgcaagaactttctctcgcctgcctgctgacttcacttgtcgttacgctgctcaaggttttgctgatttttgtactggcctcaatcgcagaaaacacgctggcacgcgggcgttttttactcattcaccatgtgacctggcttggcttcagccttgctgcgcttgcatgggtcttctggttaaccggtctgtaaggagcactgacggaatatggaaaatcttgctctgacgacgttattgctgccttttatggcgcactggtcgtttcgttttcgccacaacgtcgggccgccgaatgggggggttttgttcgccgcgctgaccacgctgtgcatgttgtcactgatctccgcgttttatcaggccgataaagttgccgtcacgttgacgttggtcaacgtgggggatgtggcgttgtttggcctggtcattgatcgcgtgagtacgctgattctgtttgtggtggtgtttctcggtttgctggtcacgatctactccacgggttatctgacggataaaaatcgcgaacacccgcataacggcacgaatcgttattacgcatttttactggtgtttatcggcgcgatggcgggactggtactctcctcgacgctgctcggtcagttgttgttttttgaaattacaggcggctgctcctgggcgttgatcagttattaccagagcgataaagcgcagcgttcagcactaaaagcgttacttatcactcatatcggctcgttggggttgtatcttgccgccgccacgctgtttttgcagaccggaacgtttgcgcttagcgcgatgagcgagttacacggcgacgcacgttatctggtttatggcggcatcctgtttgccgcgtgggggaaatcggcccagctaccgatgcaagcgtggctaccggacgcaatggaagcgccaacaccgatcagcgcctatctccacgccgcatcgatggtgaaagt

SEQ ID NO: 68 - DNA, 408 bp, Homo sapiens
  SITE (21): n equals a,t,g, or c
caggcgcaagcattgatgacnttatacagtctgtggagcaccacaacataagctttagaagtggatgcatttggaactagaaatggcacaagatgacccatcttataatggagccatcacagtgtgttgtaatgaaaagaattacagcttttcgttagcatgcaatgccaaaagattgaattgcttcccagttcttatggacattgttagtaatgggctacttggaatggttaaaccatcagtacatatccgaactgaaagaagtacatttttggaggtaaatatatataatcttacaattcctgactctcctctatcaggaatctcccagatcacccttttaagtgctggaatcttgtttttattgagtaaaccactgcataataaattaacatttggactcattct

SEQ ID NO: 69 - DNA, 1589 bp, Homo sapiens
gatttccagcttaatcatcacctgatgaacaaaaataatgactaaacctaatcatgagcttagcccggcgctgatcgtgctgatgtctatcgccaccggtctggcggtagccagtaactattacgcccagccattgctcgacaccatcgcgcgtaacttttccctttccgccagttcggcaggctttattgttaccgccgcgcagttgggctatgccgcagtctactgtttcttgttcccctcggtgatatgtttgaacgccgccgcctgattgtctcgatgaccttactggcggcatgttgattaccgccagcagtcagtcgctggcgatgatgatcctcggtacggcattaaccggtttattctcagtcgtggcacaaattctggttccgctggcagcgacgctggcttcaaccggataaacgcggcaaagtggttggcactattatgagcggtctgctgttggggatcttgctggcacggacagttgccggattgctggcgaatctcggcggctggcgcaccgtcttttgggttgcttcggtgttaatggcactgatggcgctggcattatggcgtggtctgccacaaatgaaatcagaaacccacctcaactacccacagttgttgggttccgttttcagtatgtttatcagcgataaaattctgcgtacccgcgcgttgctgggctgcctgacctttgccaatttcagcattctctggacctcaatggcctttttgcttgccgctccaccttttaactacagcgatggtgtcattggtctgtttggacttgcgggagctgccggagcgttgggcgctcgtccggcgggcggttttgccgataagggcaaatcgcaccacaccacaactttcggtctgctgctgctattactttcatggctggcgatctggtttggtcacacttccgtactggcgttgattatcggaatcctggtgctggatctcaccgtgcagggcgtgcatatcactaaccagacggtaatttatcggatacatcctgatgcgcgcaatcgcctgaccgcaggttacatgactagctactttattggcggtgccgccggttcgctaatttcagcctcagcctggcaacatggcggttgggctggcgttgtctggttggcgcgacgattgccctgcttaacttactggtctggtggcgaggttttcatcgtcaggaagccgcaaattaagcaatcagcaaccgttttcgtggctttacacttataagggtgttaagaagcccatcagtctgataaggttaagatattcattcagtctatttataatattaacaatcgttaagcgtacactctatggaaagccctactccacagcctgctcctggttcggcgaccttcatggaaggatgcaaagacagtttaccgattgttattagttatattccggtggcctttgcgttcggtctgaatgcgacccgtctgggattctctcctctcgaaagcgtttttttctcctgcatcatttatgcaggcgcgagccagttcgtcattaccgcgatgctggcagccgggagtagtttgtggattgctgcactgaccgtcatg

SEQ ID NO: 70 - DNA, 912 bp, Homo sapiens
tgggtatcggttatgccttgattgcatatcaatccaccctgaaagcgtgagcaaacttcctgacgctattgccgtctgggcgccattaatgcgttcaacatggttgatggcattgatggcttgctgggcgggttgtcctgcgtctcgtttgcagcaatcggtatgattttgtggttcgacgggcaaaccagcctcgcaatctggtgctttgcgatgatcgccgccatcctgccatacatcatgcttaaccttggtatcctgggtcgccgctacaaagtctttatgggtgatgcgggcagtacgctgattggttttaccgttatctggatcctgctcgaaacgacccagggcaaaacccatcccatcagcccggttaccgctttgtggataatcgccattccgctaatggatatggtggcgattatgtaccgtcgcctgcgtaaaggcatgagcccattctctcctgaccgtcagcatattcaccatttgatcatgcgtgccgggtttacttcccgtcaggcgtttgtgctgattacccttgccgcagcactgctcgcttccattggcgtgctggcagaatattctcattttgtcccggagtgggtcatgctggtgctctttttgctagcattcttcctctatggatattgcattaagcgtgcctggaaagttgctcgctttattaagcgcgtaaaacgcagactgcgtagaaatcgtggtggcagccccaatttaaccaaataaatgaggatgtgatgacacaaccaatgcctgggaaaccggccgaagacgctgaaaatgaactggatattcgtgggttgtttcgtaccttgtgggctgggaagctatggattattggcatggggctggcgtttgcgttaatcgcgctggcgtatacgttttttgctcgtc

SEQ ID NO: 71 - DNA, 488 bp, Homo sapiens
  SITE (462): n equals a,t,g, or c
aacaacgctactttagagctcaagtcctttatgtttctggaaattctgctgaggtattctttgtagattatggcaataagtctcatgtagatctacatcttttgatggagattccctgtcaatttcttgaacttcctttccaggctttggaatttaagatttgcaaaatgagaccatcagcaaagtctcttgtttgtggcaagcactggagtgacggggccagccagtggttcgcctctctggtgagcggctgcaccctccttgtgaaggtcttctctgtggtgcacagcgtcctgcacgtggatgtgtaccagtactcaggggtccaggatgccatcaacataagagracgtcctcatccagcagggctatgccgagctcacggaggagtcctacgagtcccaagcaaagccatkgaagttyttcaaggggcctctttttccaagttcagttaggaaaacntgacagtgggctctgtggccttttcc

SEQ ID NO: 72 - DNA, 578 bp, Homo sapiens
  SITE (375): n equals a,t,g, or c
  SITE (578): n equals a,t,g, or c
gaaaccccatctctactaaaaatacaaaattagcagggcgtggtggtgcactcctgtaatcctagctacttgggaggctgagacaggagaatcacttgaacccaggagccagaagtcgcagtgagccgtgatcatgccattgcaccccagcctgggcaaaaagagcgaaacyccatctcaaaaaataaaamcaaaaaacaaacaaaaaaaaatgtgatatcataagacagaccttttcccttctcatcagtgactggaattaactgcccatgtggaaygggttgtgggtgttggttcctttactgggtcatcgtggtaaactgcaaggtttctgctgtgacattgaaggcagacatcaaccctctaagacatttntttcctatcctctgggaatattactttttggacaatcttggtccattggtaagctcatgggaatttgtcagagtttttttgtttcttttggctcatgtttagcatcgattggcagagtgtttggagtcatcctcagaaaggaattacagtggttcggaggtgttttctgtagtgggccctcatttgggaatcgatgctaaacn

SEQ ID NO: 73 - DNA, 974 bp, Homo sapiens
gaaagcctttagcacaaagcaaaagctcattgtccatcaaaggactcatacaggagagagaccctatggctgtaacgagtgtgggaaagcgtttgcgtatatgtcgtgtctggttaagcataagagaatacacacaagggagaaacaagaggcagccaaggtggaaaatcctcctgcagagaggcacagctcattacacaccagtgatgtcatgcaggagaaaaactctgctaacggggcgactacacaagtgccttctgtggcccctcagacatcattaaacatcagcggcctcctcgcaaacaggaacgtagtccttgtgggacagccagtggtcagatgtgcagcctcaggagataacagwggatttgcacaggacagaaaccttgtgaatgcagtgaatgtggttgtgccttccgtgatcaattatgtcttattttatgttacagaaaacccataggaagaaaactcagatctatgtggaaaagggttgagcaaaaatttgtagttcattatgtggccgaaaagcatacactgagagaacatgtataaggctgagatagcctgataaactcatcctattaaaatgtatgctgtgatacacaggcaaatttgatgttaacctaagcacatacacagcaattgctcgactgtgtcaattaaatgagtaaaggaagcccaagtacttttaagtggaggaaatgaagtactgtgaatttttaaaacagatgagataattggtgttgggagtgttgcagtgactgaaaagcttcataaggggcagttggtgggaaagggctaatactgtaatggtggaatgtgggacacatatgtgtcaattcagtttccttagaccagtgccagtgtggaggattaattgaaaaccaggaccataaactttcagaactttgtattatgcagagggatctgtgaaactagtcaatttgtttcattaaacaaatattttaaaatta

SEQ ID NO: 74 - DNA, 1297 bp, Homo sapiens
ggcacgagccgaggcgggaggatgaagttgattgactatggtctctccggctaccaggaagagtctgccgaagtgaaggccatggacttcatcacctccacagccatcctgcccctgctgttcggctgcctgggcgtcttcggcctcttccggctgctgcagtgggtgcgcgggaaggcctacctgcggaatgctgtggtggtgatcacaggcgccacctcagggctgggcaaagaatgtgcaaaagtcttctatgctgcgggtgctaaactggtgctctgtggccggaatggtggggccctagaagagctcatcagagaactcaccgcttctcatgccaccaaggtgcagacacacaagccttacttggtgaccttcgacctcatagactctggggccatagttgcagcagcagctgagatcctgcagtgctttggctatgtcgacatacttgtcaacaatgctgggatcagctaccgtggtaccatcatggacaccacagtggatgtggacaagagggtcatggagacaaactactttggcccagttgctctaacgaaagcactcctgccctccatgatcaagaggaggcaaggccacattgtcgccatcagcagcatccagggcaagatgagcattccttttcgatcagcatatgcagcctccaagcacgcaacccaggctttctttgactgtctgcgtgccgagatggaacagtatgaaattgaggtgaccgtcatcagccccggctacatccacaccaacctctctgtaaatgccatcaccgcggatggatctaggtatggagttatggacaccaccacagcccagggccgaagccctgtggaggtggcccaggatgttcttgctgctgtggggaagaagaagaaagatgtgatcctggctgacttactgccttccttggctgtttatcttcgaactctggctcctgggctcttcttcagcctcatggcctccagggccagaaaagagcggaaatccaagaactcctagtactctgaccagccagggccagggcagagaagcagcactcttaggcttgcttactctacaagggacagttgcatttgttgagactttaatggagatttgtctcacaagtgggaaagactgaagaaacacatctcgtgcagatctgctggcagaggacaatcaaaaacgacaacaagcttcttcccagggtgaggggaaacacttaaggaataaatatggagctggggtttaacactaaaaactagaaataaacatctcaaacagtaaaaaaaaaaaaaaaaaa

SEQ ID NO: 75 - DNA, 1620 bp, Homo sapiens
tcccccgggctgcaggaattcggcacgaggagcgcggagccgggccgcacccgccgagccgtgaaaaaagtacatctcctggaagggatgctttttagctgagctctggtggatgagaggagctagccttgaaaaacttgatactgatggacattgtgtgggccagaggcagggatggttggctatgaccccaaaccagatggcaggaataacaccaagttccaggtggcagtggctgggtctgtgtctggacttgttactcgggcgctgatcagtcccttcgacgtcatcaagatccgtttccagcttcagcatgagcgcctgtctcgcagtgaccccagcgcaaagtaccatggcatcctccaggcctctaggcagattctgcaggaggagggtccgacagctttctggaaaggacacgtcccagctcagattctctccataggctatggagctgtccaattcttgtcatttgaaatgctgacggagctggtccacagaggcagcgtgtacgacgcccgggaattctcagtgcactttgtatgtggtggcctggctgcctgtatggccaccctcactgtgcaccccgtggatgttctgcgcacccgctttgcagctcagggtgagcccaaggtctataatacgctgcgccacgccgtggggaccatgtataggagcgaaggcccccaggttttctacaaaggcttggctcccaccttgatcgccatcttcccctacgccgggctgcagttctcttgctacagctccttgaagcacctgtacaagtgggccataccagccgaaggaaagaaaaatgagaacctccaaaacctgctttgtggcagtggagctggtgtcatcagcaagaccctgacatatccgctggacctcttcaagaagcggctacaggttggagggtttgagcatgccagagctgcctttggccaggtacggagatacaagggcctcatggactgtgccaagcaggtgctacaaaaggaaggcgccctgggcttcttcaagggcctgtcccccagcttgctgaaggctgccctctccacaggcttcatgttcttctcgtatgaattcttctgtaatgtcttccactgcatgaacaggacagccagccagcgctgagcgcaggaaggaccccaggtcttccctggaggcagcctcctgaaggaaggaagattcagtctccactgagaggtgccgtctggcccttccctgcaggccagctgccccaagcggggtagcagccttgaacccacccagctgggacaccaccagaaggtccagggctctccccatgagagaatcagagggaatgcaggacgtggtctatggtgagccaacgacacagtgagaaggagcaggaagttgctgtttctcctctgaccagcccacactgcaaaggaaacagacgccatcctacacctatcagccctgcctgccaggagaacagaacacactcctggtctggatggggctgctgcttgagtgcagagggctgcggtaggccctttgcaggagtcaggtccctacacttggcctgtttttccaacctatttaatagacattaaagctaaacacacaaaaaaaaaaaaaaaaaaaaaaaaa

SEQ ID NO: 76 - DNA, 780 bp, Homo sapiens
  SITE (577): n equals a,t,g, or c
  SITE (674): n equals a,t,g, or c
  SITE (701): n equals a,t,g, or c
  SITE (712): n equals a,t,g, or c
  SITE (714): n equals a,t,g, or c
  SITE (779): n equals a,t,g, or c
gcggccgcggagactggcaggcgggaccctcaagcagtgtgaggcggacccaggccattcggagacgccacaatgcaggcagcaaccccacccctccagcctctgtcatgggctcgccgcccagcagcctgcaggaagctcagcggggccgggctgcctcccactcccgggcgctgacgctgccctctgcgctgcatttcgcctcttcactgttgctcacccgggccggtgccaatgtgcatgaggcctgcacctttgatgacacttctgagggtgctgtgcactatttctacgatgagagcggtgtgcggcgttcctacacctttggcctggctggaggcggctacgagaaccctgtagggcagcaaggggagcagacagctaatggagcctgggaccgacactcgcattcctccagcttccactcggctgatgtccctgaggctacaggcggctgaacctgctgmasccraggcctgtggttctgcarggcatgmaggtgcsccgggtgsccctggagatcccggaggactycctgcacgaatcccagsgagtcaagtaactttaagccaggtgnatatgccggtgtcaagtcactggtcgctgccccaaggaatcgtgcgggagctgaaaagtcgaggaagtggcctacaaatccagagacacaggctatnaagacctagcaaggatgcaagggttgncagcattttgntnttcaacttctggctttgcttaattctggtctggaactaaatgaaccggaactttaaaaactttcna

SEQ ID NO: 77 - DNA, 1918 bp, Homo sapiens
tcgacccacgcgtccggagagcgcggagccgggccgcacccgccgagccgtgtgagtaacctctacctccgtccttctcgccgccctctcggggaccagcaccctcgctcctcagggtggtcgggagggagcacacgcacccgggcgctcacgagagggcggggactgtgtacacacgtgtcacaccagaccagagaagcatctccagggacaccggcggccgagccccgcgcacgcccttgagcacctgagctccagggcgtcccctcggactcaaggagaaaaaacacaccccgaggcacacgtggacacctagcccttctccctgtgatcagttaccaactacctgttgatgtgtgtggttacagacttctttctatgctttgtacaactctacagaccgtatcttgatactgatggacattgtgtgggccagaggcagggatggttggctatgaccccaaaccagatggcaggaataacaccaagttccaggtggcagtggctgggtctgtgtctggacttgttactcgggcgctgatcagtcccttcgacgtcatcaagatccgtttccagcttcagcatgagcgcctgtctcgcagtgaccccagcgcaaagtaccatggcatcctccaggcctctaggcagattctgcaggaggagggtccgacagctttctggaaaggacacgtcccagctcagattctctccataggctatggagctgtccaattcttgtcatttgaaatgctgacggagctggtccacagaggcagcgtgtacgacgcccgggaattctcagtgcactttgtatgtggtggcctggctgcctgtatggccaccctcactgtgcaccccgtggatgttctgcgcacccgctttgcagctcagggtgagcccaaggtctataatacgctgcgccacgccgtggggaccatgtataggagcgaaggcccccaggttttctacaaaggcttggctcccaccttgatcgccatcttcccctacgccgggctgcagttctcttgctacagctccttgaagcacctgtacaagtgggccataccagccgaaggaaagaaaaatgagaacctccaaaacctgctttgtggcagtggagctggtgtcatcagcaagaccctgacatatccgctggacctcttcaagaagcggctacaggttggagggtttgagcatgccagagctgcctttggccaggtacggagatacaagggcctcatggactgtgccaagcaggtgctacaaaaggaaggcgccctgggcttcttcaagggcctgtcccccagcttgctgaaggctgccctctccacaggcttcatgttcttctcgtatgaattcttctgtaatgtcttccactgcatgaacaggacagccagccagcgctgagcgcaggaaggaccccaggtcttccctggaggcagcctcctgaaggaaggaagattcagtctccactgagaggtgccgtctggcccttccctgcaggccagctgccccaagcggggtagcagccttgaacccacccagctgggacaccaccagaaggtccagggctctccccatgagagaatcagagggaatgcaggacgtggtctatggtgagccaacgacacagtgagaaggagcaggaagttgctgtttctcctctgaccagcccacactgcaaaggaaacagacgccatcctacacctatcagccctgcctgccaggagaacagaacacactcctggtctggatggggctgctgcttgagtgcagagggctgcggtaggccctttgcaggagtcaggtccctacacttggcctgtttttccaacctatttaatagacattaaagctaaacacacattccttatcttaaaaaaaaaaaaaaaaaaaaaaaaaaaaaaaaaaaaaaaaa

SEQ ID NO: 78 - DNA, 1730 bp, Homo sapiens
ggcggggacccgggctactgcggtgtggactcgagggctgggcgcggggccggcgcagaagccgccagctggagacgatggtggaccacttggccaacacggagatcaacagccagcgcatcgcggcagtggagagctgcttcggggcctcggggcagccgctggcgctgccaggccgagtgctgctgggcgagggcgtgctgaccaaagagtgccgcaagaaggccaagccgcgcatcttcttcctctttaacgacatcctggtgtatggcagcatcgtgctcaacaagcgcaagtaccgcagccagcacatcatccccctggaggaggtcacactggagctgttgccggagacgctgcaggccaagaaccgctggatgatcaagacggccaagaagtcctttgtggtgtcggccgcctccgctacggagcgccaggaatggattagccacatcgaggagtgcgtgcggcggcaactgagggccacgggccgcccgcccagcacggagcacgcggcaccctggatccccgacaaggccacggacatctgcatgcgctgcacgcagacgcgcttctctgccctcacgaggcgccaccactgccgcaagtgcggcttcgtggtctgcgctgagtgctcgcgccagcgcttcctgctcccgcgcctgtcccccaagcccgtgcgcgtctgcagcctctgctaccgcgaactggccgcccagcagcggcaggaggaggcggaggagcagggcgcggggtccccagggcagccagcccacctggcccggcccatctgcggasgtccagtggagatgacgatgactccgacgaggacaaggagggcagcagggacggcgactggcccagcagcgtggagttctacgcctcgggggtggcctggtctgccttccacagctgacccccggcctgcagaacatctgtccccaagccagctccactgcccaggcccccaagagggcagctccagaagctgcccagggctccgggaccccatcccatggtggcaggtgcagcggtggggagtggctctttctggactcccagtgcctttttgctggacactgtgtccttatggcttcactgcaggtaatgcctttcccttcaggaagccccagaacacccacaggtcttggtaacaaacgccaccttacactctgcaggctgcagcggcagytccagatggcctcctgagctggacgaccccaggtctccagacatctagggaccagagcagktttgggaacacagagggaagacaggatgggagtgtagccacagaacccacctgcaccctgacaggcacaccccactgaagagcctgagtcccaggaggcctcctggaagcccaggactgcccacccaccacgctggtgcccaccgcctggccagccaagccctgccgatcagacatgtgggctccccgaagcccagccagagactgccgtgctgtgggtgccaccaggcccagggactgcagcctgagctccccgaggcccagggcagccgggtgaggactctgtcctgtgtcacctctctccaggtgtccagctgtctcatgcctttttgtcctgtcctcagctctccgtgtggtcagcgaaaccattgttttctgttaggactcagttgcaagaacagaaaccctgcccccacttaataataaaaaagaaagtttattgatgggtggttgcaaaacaaaaaaaaaaaaaaaaaaa

SEQ ID NO: 79 - DNA, 397 bp, Homo sapiens
cggagccgccgccactcatctctgcccagctgctgccctccccaggaggcctccatggcttcacctacctccaccaacccagcgcatgcccactttgagagcttcctgcaggcccagctgtgccaggacgtgctgagcagcttccaggagctgtgtggggccctggggctggaacccggtggggggctgccccagtaccacaagatcaaggaccagctcaactactggagcgccaagtcactgtggaccaagctggacaagcgagcaggccagcctgtctaccagcagggccgggcctgcaccagcaccaagtgcctggtggtgggtgctggaccttgcgggctgcgggtcgctgtggarctggcgctkctgggggcccgagtggtgctggtggaaa

SEQ ID NO: 80 - protein, 234 aa, Homo sapiens
LIVNLALVDLGLALTLPFWAAESALDFHWPFGGALCKMVLTATVLNVYASIFLITALSVARYWVVAMAAGPGTHLSLFWARIATLAVWAAAALVTVPTAVFGVEGEVCGVRLCLLRFPSRYWLGAYQLQRVVLAFMVPLGVITTSYLLLLAFLQRQQRRRQDSRVVARSVRILVASFFLCWFPNHVVTLWGVLVKFDLVPWNSTFYTIQTYVFPVTTCLAHSNSCLNPIVYVLS

SEQ ID NO: 81 - protein, 299 aa, Homo sapiens
GTRRNSIQIYLLNVAIADLLLIFCLPFRIMYHINQNKWTLGVILCKVVGTLFYMNMYISIILLGFISLDRYIKINRSIQQRKAITTKQSIYVCCIVWMLALGGFLTMIILTLKKGGHNSTMCFHYRDKHNAKGEAIFNFILVVMFWLIFLLIILSYIKIGKNLLRISKRRSKFPNSGKYATTARNSFIVLIIFTICFVPYHAFRFIYISSQLNVSSCYWKEIVHKTNEIMLVLSSFNSCLDPVMYFLMSSNIRKIMCQLLFRRFQGEPSRSESTSEFKPGYSLHDTSVAVKIQSSSKST

SEQ ID NO: 82 - protein, 617 aa, Homo sapiens
GTRECPLCLVRLPPERAPRLLSCPHRSCRDCLRHYLRLEISESRVPISCPECSERLNPHDIRLLLADPPLMHKYEEFMLRRYLASDPDCRWCPAPDCGYAVIAYGCASCPKLTCEREGCQTEFCYHCKQIWHPNQTCDMARQQRAQTLRVRTKHTSGLSYGQESGPDDIKPCPRCSAYIIKMNDGSCNHMTCAVCGCEFCWLCMKEISDLHYLSPSGCTFWGKKPWSRKKKILWQLGTLIGAPVGISLIAGIAIPAMVIGIPVYVGRKIHSRYEGRKTSKHKRNLAITGGVTLSVIASPVIAAVSVGIGVPIMLAYVYGVVPISLCRGGGCGVSTANGKGVKIEFDEDDGPITVADAWRALKNPSIGESSIEGLTSVLSTSGSPTDGLSVMQGPYSETASFAALSGGTLSGGILSSGKGKYSRLEVQADVQKEIFPKDTASLGAISDNASTRAMAGSIISSYNPQDRECNNMEIQVDIEAKPSHYQLVSGSSTEDSLHVHAQMAENEEEGSGGGGSEEDPPCRHQSCEQKDCLASKPWDISLAQPESIRSDLESSDAQSDDVPDITSDECGSPRSHTAACPSTPRAQGAPSPSAHMNLSALAEGQTVLKPEGGEARV

SEQ ID NO: 83 - protein, 177 aa, Homo sapiens
  SITE (32): Xaa equals any of the naturally occurring L-amino acids
  SITE (155): Xaa equals any of the naturally occurring L-amino acids
WFPGARAVLGMEAVAQVKMACRSLLTGLRPAXQQAVVTSEWAEGTQDMSAPALSVQHDFPDEAFLSQGLSKLLAQLSVVIPLPQVSLVPCPTPARLHTRQSSVAVIHLSPGQESVLSPYLSALSAAPHSFSGYACPGTLSFPAFFPCLHTLLMLXPSPPLLFLHLLCRRRWSSPEEP

SEQ ID NO: 84 - protein, 206 aa, Homo sapiens
  SITE (53): Xaa equals any of the naturally occurring L-amino acids
  SITE (200): Xaa equals any of the naturally occurring L-amino acids
RPSRMLWPPSPSCGPSGQVGPCVSGAAPGPSSPPASAAGTRPGPAVPESEPRXTSARAGRHKEHRLEQSQEEEHVALAMLKSLQSDILHDADSNDLKVIIISAEGPVFSSGHDLKELTEEQGRDYHAEVFQTCSKVMMHIRNHPVPVIAMVNGLATAAGCQLVASCDIAVASDKSSFATPGVKRRALLFYPWGCLGKSMXRKWAWK

SEQ ID NO: 85 - protein, 128 aa, Homo sapiens
  SITE (45): Xaa equals any of the naturally occurring L-amino acids
PLLNSKFAPPTANYHLWSCHLSPDQIGMVHLLDQAWITCLGSSCXKSPESTCFFSFCSSIEVQPPTKTQEVVQSPGSSDAPSALCFCCLTSIGGLIKLLGPQVQLLNIFLDLSPHPNQPHQNPSLLPV

SEQ ID NO: 86 - protein, 378 aa, Homo sapiens
  SITE (81): Xaa equals any of the naturally occurring L-amino acids
  SITE (85): Xaa equals any of the naturally occurring L-amino acids
  SITE (105): Xaa equals any of the naturally occurring L-amino acids
  SITE (106): Xaa equals any of the naturally occurring L-amino acids
  SITE (179): Xaa equals any of the naturally occurring L-amino acids
  SITE (308): Xaa equals any of the naturally occurring L-amino acids
  SITE (366): Xaa equals any of the naturally occurring L-amino acids
  SITE (375): Xaa equals any of the naturally occurring L-amino acids
ELDPKCRGLPFSSFLILPFQRITRLKLLVQNILKRVEERSERECTALDAHKELEMVVKACNEGVRKMSRTEQMISIQKKMXFKIXSVPIISHSRWLLKQGELQQXXGPKTSRTLRTKKLFHEIYLFLFNDLLVICRQIPGDKYQVFDSAPRGLLRVEELEDQGQTLANVFILRLLENAXDREATYMLKASSQSEMKRWMTSLAPNRRTKFVSFTSRLLDCPQVQCVHPYVAQQPDELTLELADILNILDKTDDGWIFGERLHDQERGWFPSSMTEEILNPKIRSQNLKECFRVHKMDDPQRSRTRTAXSWAAGIGNDPHPGGQREQGLHETPTEGGGGALGSTGQHLPRWQDLAWGARPSSLPTHXCSCVLAPCXQTG

SEQ ID NO: 87 - protein, 155 aa, Homo sapiens
  SITE (6): Xaa equals any of the naturally occurring L-amino acids
  SITE (55): Xaa equals any of the naturally occurring L-amino acids
  SITE (101): Xaa equals any of the naturally occurring L-amino acids
  SITE (116): Xaa equals any of the naturally occurring L-amino acids
WGWGGXELQCAILVGERIGHFWVLGCCGRGMGRKNSRVGDVEVEKEGPVQAWPVXLETENSPGDREVTPLCLASATLPFSGGEAALSSATLAFILCITTAXAPLARLNGWGSQGTXNKSQNGRVSWGQRGGTEGARGEKVIPPSLLSPKSPQIES

SEQ ID NO: 88 - protein, 328 aa, Homo sapiens
  SITE (90): Xaa equals any of the naturally occurring L-amino acids
AGPCLVCKARGLVGGWLGSPRCLATRATECKTESLYVTSAHADLTCFDVCVMLKYAICNLSWAKSGAQQERHGRGLSAAIRFRTEAQRSXAKSSYLATEPIITTATPAAATVSATSKMCPGNWLWASMTFMARFSRSSSRSPVRTRGTLEEMPTVQHPFLNVFELERLLYTGKTACNHADEVWPGLYLGDQDMANNRRELRRLGITHVLNASHSRWRGTPEAYEGLGIRYLGVEAHDSPAFDMSIHFQTAADFIHRALSQPGGKILVHCAVGVSRSATLVLAYLMLYHHLTLVEAIKKVKDHRGIIPNRGFLRQLLALDRRLRQGLEA

SEQ ID NO: 89 - protein, 137 aa, Homo sapiens
  SITE (100): Xaa equals any of the naturally occurring L-amino acids
  SITE (122): Xaa equals any of the naturally occurring L-amino acids
  SITE (128): Xaa equals any of the naturally occurring L-amino acids
GTVGTKYPPLRIRKAPGVCWGHSPCVLRHSWRVPPFPMPFFLGNISSNGTKAHSNPRSPWGKHRPGTRPASGEESSHSCSSVPFSAWCLSGFHLGLPLPXSGTPLLPAPPAAFPGNIPHWPXAGPGFXFPNSWAGIW

SEQ ID NO: 90 - protein, 115 aa, Homo sapiens
  SITE (13): Xaa equals any of the naturally occurring L-amino acids
  SITE (113): Xaa equals any of the naturally occurring L-amino acids
INDSLALKAGVVXVAMGAGGADIALASADVVLIGSDLRRLGTCVRLSRQCRQTLQVNVIIGLGWTLAIVVFAAFGWLGAAGAMIAAVLHNLSTLLVLGNAGRLLRFQEPLLKXEE

SEQ ID NO: 91 - protein, 140 aa, Homo sapiens
  SITE (99): Xaa equals any of the naturally occurring L-amino acids
  SITE (105): Xaa equals any of the naturally occurring L-amino acids
  SITE (121): Xaa equals any of the naturally occurring L-amino acids
  SITE (129): Xaa equals any of the naturally occurring L-amino acids
  SITE (130): Xaa equals any of the naturally occurring L-amino acids
  SITE (139): Xaa equals any of the naturally occurring L-amino acids
ERRGEKSRGGPSPEPGCPRRPREQPRVPGERHRCCLAVRGALDGGGGRRARPCCWWRCWSAPPSSASPPTSCCTSTAPTSTGPASRRRAPRWYSWAPPXCWRPWXAGWPTVPGPLTRGRAXPAALTGRXXPAARQRFPXG

SEQ ID NO: 92 - protein, 235 aa, Homo sapiens
  SITE (114): Xaa equals any of the naturally occurring L-amino acids
  SITE (122): Xaa equals any of the naturally occurring L-amino acids
  SITE (141): Xaa equals any of the naturally occurring L-amino acids
DQQEQTRKGREGKEKRKLECISVGHLLRPGERSGIIMFCSEKKLREVERIVKANDREYNEKFQYADNRIHTSRYNILTFLPINLFEQFQRVANAYFLCLLILQLIPEISSLTWXTTIVPLVXVITMTAVKDATDDYFRHKXDNQVNNRQSEVLINSKLQNEKWMNVKVGDIIKLENNQFVAADLLLLSSSEPHGLCYVETAELDGETNLKVRHALSVTSELGSRLSADLQGFDGP

SEQ ID NO: 93 - protein, 310 aa, Homo sapiens
  SITE (64): Xaa equals any of the naturally occurring L-amino acids
  SITE (303): Xaa equals any of the naturally occurring L-amino acids
VLDRERPPAILELDEKPVIIASCLHKEYAGQKKSCFSKRKKKIAARNISFCVQEGEILGLLGPXGAGKSSSIRMISGITKPTAGEVELKGCSSVLGHLGYCPQENVLWPMLTLREHLEVYAAVKGLRKADARLAIARLVSAFKLHEQLNVPVQKLTAGITRKLCFVLSLLGNSPVLLLDEPSTGIDPTGQQQMWQAIQAVVKNTERGVLLTTHNLAEAEALCDRVAIMVSGRLRCIGSIQHLKNKLGKDYILELKVKETSQVTLVHTEILKLFPQAAGQERYSSLLTYKLPVADVYPLSQTFXKLEAVKA

SEQ ID NO: 94 - protein, 185 aa, Homo sapiens
  SITE (102): Xaa equals any of the naturally occurring L-amino acids
  SITE (153): Xaa equals any of the naturally occurring L-amino acids
  SITE (155): Xaa equals any of the naturally occurring L-amino acids
QPVCEMMVRWALLCEFWGDIAKEFYWKTPCPGPFLRYNFDVTKGKIFIEWMKGATTNICYNVLDRNVHEKKLGDKVAFYWEGNEPGETTQITYHQLLVQVCXFSNVLRKQGIQKGDRVAIYMPMIPELVVAMLACARIGALHSIVFAGFSSEXLXERILDSSCSLLITTDAFYRGEKLVKPEGAG

SEQ ID NO: 95 - protein, 136 aa, Homo sapiens
  SITE (85): Xaa equals any of the naturally occurring L-amino acids
  SITE (108): Xaa equals any of the naturally occurring L-amino acids
  SITE (111): Xaa equals any of the naturally occurring L-amino acids
  SITE (112): Xaa equals any of the naturally occurring L-amino acids
  SITE (118): Xaa equals any of the naturally occurring L-amino acids
  SITE (126): Xaa equals any of the naturally occurring L-amino acids
GGRTRGPASVLAALRLLAPHAMQPSPPPTELVPSERAVVLLSCALSALGSGLLVATHALWPDLRSRARRLLLFLSLADLLSAASXFYGVLQNFAGPSWDCVLQGALSXFAXXSSFFWXVAIALYCXSHRPRRARAL

SEQ ID NO: 96 - protein, 117 aa, Homo sapiens
  SITE (116): Xaa equals any of the naturally occurring L-amino acids
ESFMGRERQSSCWWMRVAVAGGVSGETARGPERHWEEESSALQRNRSREENRAAASGLWSGDEAQVDSILCFAGGGGGIILTPVLGPVPASQGRPGPCHCCAQDSPELSDFSVEFXF

SEQ ID NO: 97 - protein, 120 aa, Homo sapiens
AMAPSHLQTFIIFLTYCTYLIILFNYMYKKRKQEFNYVVLPRPFCTQSRLIFFLFFLFFETESCPVAQAGVQWRDLSSLQAPPRGFTPFSCLSLLSSWDYRHPPPCPANFLYFLVETGFH

SEQ ID NO: 98 - protein, 175 aa, Homo sapiens
  SITE (103): Xaa equals any of the naturally occurring L-amino acids
  SITE (163): Xaa equals any of the naturally occurring L-amino acids
NQSFPPVMSLTHRLHLCKYWGCAVSNVCRFWEGRPLPLMIVVPYTLPVSLPVGSCVIITGTPILTFVKDPQLEVNFYTGMDEDSDIAFQFRLHFGHPAIMNSXVFGIWRYEEKCYYLPFEDGKPFELCIYVRHKEYKVMVNGQRIYNFAHRFPPASVKMLQVXRDISLTRVLISD

SEQ ID NO: 99 - protein, 228 aa, Homo sapiens
  SITE (15): Xaa equals any of the naturally occurring L-amino acids
  SITE (26): Xaa equals any of the naturally occurring L-amino acids
  SITE (209): Xaa equals any of the naturally occurring L-amino acids
  SITE (224): Xaa equals any of the naturally occurring L-amino acids
NSARAETKQLFLEGXLHPCNVLMCPXTCVTNLPKPRQKQPEIGPASVMVGNLVSGKRIAQASGRDLGQIEDNDQARKFLFLSEVLQWRAQTTPDHILYTLLNCRGAIANSLTCVQLHKRAEKIAVMLMERGHLQDGDHVALVYPPGIDLIAAFYGCLYAGCVPITVRPPHPQNIATTLPTVKMIVEVSRSACLMTTQLICKLLRSREAXAAVDVRSGPSSWTQXVLYC

SEQ ID NO: 100 - protein, 124 aa, Homo sapiens
TLRIYNQVMILTDPEWQAVLLSLKVSSLAVLFSLPFGIFFAWLLVRCTFPGKALLDSVLHLPLVLPPVVVGYLLLVSMGRRGFIGERLYDWFGITFAFSWRGAVLAAAVMSFPLMVRAIRLALE

SEQ ID NO: 101 - protein, 177 aa, Homo sapiens
  SITE (98): Xaa equals any of the naturally occurring L-amino acids
RWRISVRCLIRRIRHHSPHADYGCGSHYASAILAFPMAWYMARYTSGKMKAFFYIAVMLPMWASYIVKAYAWTLLLAKDGVAQWFLQHLGLEPLLTAXLTLPAVGGNTLSTSGLGRFLVFLYIWLPFMILPVQAALERLPPSLLQASADLGARPRQTFRYVVLPLAIPGIAAGSIFT

SEQ ID NO: 102 - protein, 254 aa, Homo sapiens
FLSESGIETMWKTLHQLAIPPRLYQICGWFIPWLAIASVVVLTVGWIWGFGFAPADYQQGNSYRIIYLHVPAAIWSMGIYASMAVAAFIGLVWQMKMANLAVAAMAPIGAVFTFIALVTGSAWGKPMWGTWWVWDARLTSELVLLFLYVGVIALWHAFDDRRLAGRAAGILVLIGVVNLPIIHYSVEWWNTLHQGSTRMQQSIDPAMRSPLRWSIFGFLLLSATLTLMRMRNLILLMEKRRPWVSELILKRGRK

SEQ ID NO: 103 - protein, 265 aa, Homo sapiens
  SITE (43): Xaa equals any of the naturally occurring L-amino acids
RPRTGREKVAMAAVDSFYLLYREIARSCNCYMEALALVGAWYXARKSITVICDFYSLIRLHFIPRLGSRADLIKQYGRWAVVSGATDGIGKAYAEELASRGLNIILISRNEEKLQVVAKDIADTYKVETDIIVADFSSGREIYLPIREALKDKDVGILVNNVGVFYPYPQYFTQLSEDKLWDIINVNIAAASLMVHVVLPGMVERKKGAIVTISSGSCCKPTPQLAAFSASKAYLDHFSRALQYEYASKGIFVQSLIPFLCRPPA

SEQ ID NO: 104 - protein, 175 aa, Homo sapiens
  SITE (96): Xaa equals any of the naturally occurring L-amino acids
  SITE (98): Xaa equals any of the naturally occurring L-amino acids
  SITE (129): Xaa equals any of the naturally occurring L-amino acids
  SITE (141): Xaa equals any of the naturally occurring L-amino acids
  SITE (145): Xaa equals any of the naturally occurring L-amino acids
EGTGPEFPGRPTRPVHVIKMSLLSKKFCLRLLQIAWLGWDLERGLLAAFWAQRLRAGHRAGGTGCWGAWHFSGSWRGSLASVGPVPPNVSVSQPFXFXSASCLASPGHPVPPSPLICSDGRSLTPCPHXQHRVLTSWLFRXSPSXLCPPLGFLLSIFLSFFSKPPIPRPPFPRVF

SEQ ID NO: 105 - protein, 425 aa, Homo sapiens
  SITE (140): Xaa equals any of the naturally occurring L-amino acids
  SITE (196): Xaa equals any of the naturally occurring L-amino acids
  SITE (351): Xaa equals any of the naturally occurring L-amino acids
  SITE (368): Xaa equals any of the naturally occurring L-amino acids
PPKRAGLSWPVGLPAPFTPHSRFEVLGWDYFTEQHTFSCADGAPKCPLQGASRADVGDALETALEQLNRRYQPRLRFQKQRLLNGYRRFDPARGMEYTLDLLLECVTQRGHRRALARRVSLLRPLSRVEILPMPYVTEAXRVQLVLPLLVAEAAAAPAFLEAFAANVLEPREHALLTLLLVYGPREGGRGAPDPFXGVKAAAAELERRYPGTRLAWLAVRAEAPSQVRLMDVVSKKHPVDTLFFLTTVWTRPGPEVLNRCRMNAISGWQAFFPVHFQEFNPALSPQRSPPGPPGAGPDPPSPPGADPSRGAPIGGRFDRQASAEGCFYNADYLAARARLAGELAGQEEEEXLEGLEVMDVFLRFSGLXLFRAVEPGLVQKFSLRDCSPRLSEELYHRCRLSNLEGLGGRAQLAMALFEQEQANST

SEQ ID NO: 106 - protein, 372 aa, Homo sapiens
LLSGLLLLTLAIAVLNTLVPLWLAQEHMSTWQVGVVSSSYFTGNLVGTLLTGYVIKRIGFNRSYYLASFIFAAGCAGLGLMIGFWSWLAWRFVAGVGCAMIWVVVESALMCSGTSRNRGRLLAAYMMVYYVGTFLGQLLVSKVSTELMSVLPWVTGLTLAGILPLLFTRVLNQQAENHDSTSITSMLKLRQARLGVNGCIISGIVLGSLYGLMPLYLNHKGVSNASIGFWMAVLVSAGILGQWPIGRLADKFGRLLVLRVQVFVVILGSIAMLSQAAMAPALFILGAAGFTLYPVAMAWACEKVEHHQLVAMNQALLLSYTVGSLLGPSFTAMLMQNFSDNLLFIMIASVSFIYLLMLLRNAGHTPKPVAHV

SEQ ID NO: 107 - protein, 111 aa, Homo sapiens
  SITE (22): Xaa equals any of the naturally occurring L-amino acids
  SITE (53): Xaa equals any of the naturally occurring L-amino acids
  SITE (92): Xaa equals any of the naturally occurring L-amino acids
QNSSHFKVNNSMACSIFTMLYXLYLCLVSRHFHLSKGSPCPLSSYSPFLPSPXFWQPPIHLLSLDYLVWIVHINGIIQYVTCDLLADSTQHXIFRVHPCHGSTRTLPTWDK

SEQ ID NO: 108 - protein, 150 aa, Homo sapiens
  SITE (126): Xaa equals any of the naturally occurring L-amino acids
  SITE (146): Xaa equals any of the naturally occurring L-amino acids
EFGTSATWTRYGKEISMVRIPNRGSARYLTRKYNRNETYIRENFLVLDVFFEALTSEAMEQRAAYGLSALLGDLGGQMGLFIGASILTLLEILDYIYEVSWDRLKRVWKASQDPPADLHWGHLHFXASRAEGTESLPEAGGRSGEXGGQQ

SEQ ID NO: 109 - protein, 225 aa, Homo sapiens
FLFCAINFGMPAGLASLVLQAQAFFTIMLGAFTFGERLHGKQLAGIALAIFGVLVLIEDSLNGQHVAMLGFMLTLAAAFSWACGNIFNKKIMSHSTRPAVMSLVIWSALIPIIPFFVASLILDGSATMIHSLVTIDMTTILSLMYLAFVATIVGYGIWGTLLGRYETWRVAPLSLLVPVVGLASAALLLDERLTGLQFLGAVLIMTGLYINVFGLRWRKAVKVGS

SEQ ID NO: 110 - protein, 191 aa, Homo sapiens
  SITE (33): Xaa equals any of the naturally occurring L-amino acids
  SITE (94): Xaa equals any of the naturally occurring L-amino acids
  SITE (176): Xaa equals any of the naturally occurring L-amino acids
NVAETSITISGIVYVIDCGFVKLRAYNPRTAIXCLVVVPVSQASANQRAGRGGRSRSGKCYRLYTEEAFDKLPQSTVPEMQRSNLAPVILQLKXLGIDNVLRFHFMSPPPAQSMVQALELLYALGGLDKDCRLTEPLGMRIAEFPLNPMFAKMLLESGNFGCSQEILSIAAMMQIXNIFVVPPKPEVSRRP

SEQ ID NO: 111 - protein, 308 aa, Homo sapiens
  SITE (303): Xaa equals any of the naturally occurring L-amino acids
QLSPSQAPAGAQEVARRVTVGSASHGGRRSTMATTVSTQRGPVYIGELPQDFLRITPTQQQRQVQLDAQAAQQLQYGGAVGTVGRLNITVVQAKLAKNYGMTRMDPYCRLRLGYAVYETPTAHNGAKNPRWNKVIHCTVPPGVDSFYLEIFDERAFSMDDRIAWTHITIPESLRQGKVEDKWYSLSGRQGDDKEGMINLVMSYALLPAAMVMPPQPVVLMPTVYQQGVGYVPITGMPAVCSPGMVPVALPPAAVNAQPRCSEEDLKAIQDMFPNMDQEVIRSCWKPSEGTRMPPSTSLLQDGXRAIEP

SEQ ID NO: 112 - protein, 172 aa, Homo sapiens
  SITE (9): Xaa equals any of the naturally occurring L-amino acids
  SITE (148): Xaa equals any of the naturally occurring L-amino acids
  SITE (152): Xaa equals any of the naturally occurring L-amino acids
  SITE (162): Xaa equals any of the naturally occurring L-amino acids
GSAGTARIXGSTTRPDPEEPDGGELVLGGSDPAHYIPPLTFVPVTVPAYWQIHMERVKVGPGLTLCAKGCAAILDTGTSLITGPTEEIRALHAAIGGIPLLAGEYIILCSEIPKLPAVSFLLGGVWFNLTAHDYVIQTTRNGVRSACXVSKXWMSSAARAFXISVTSSLGSM

SEQ ID NO: 113 - protein, 214 aa, Homo sapiens
  SITE (192): Xaa equals any of the naturally occurring L-amino acids
  SITE (203): Xaa equals any of the naturally occurring L-amino acids
EIPLEKENQDKLVKFMIRIGVFSILYLVPLLVVIGCYFYEQAYRGIWETTWIQERCREYHIPCPYQVTQMSRPDLILFLMKYLMALIVGIPSVFWVGSKKTCFEWASFFHGRRKKEIVNESRQVLQEPDFAQSLLRDPNTPIIRKSRGTSTQGTSTHASSTQLAMVDDQRSKAGSIHSKVSSYHGSLHRSRXGRYTPCSYRGXEGATHGIQVTV

SEQ ID NO: 114 - protein, 101 aa, Homo sapiens
  SITE (89): Xaa equals any of the naturally occurring L-amino acids
  SITE (101): Xaa equals any of the naturally occurring L-amino acids
WMFLQDCRVPLAVASLVLCLATGSWHLQNRASLACAGGLSSKVTTPVTCAVRTFPHQGPLGLLLWARSHNYRASFARASILSFFLGQLXTVACVDLKLFCX

SEQ ID NO: 115 - protein, 263 aa, Homo sapiens
RRSLSPGSVSPILILDTRCRMVSSPCTPASSRTCSRILGLSLGTAALFAAGANVALLLPNWDVTYLLRGLLGRHAMLGTGLWGGGLMVLTAAILISLMGWRYGCFSKSGLCRSVLTALLSGGLALLGALICFVTSGVALKDGPFCMFDVSSFNQTQAWKYGYPFKDLHIGIICMTVRSGTPSAWSPLQLLSGTCPSSPPFCASACSSFSWWSFMSSTASWAFSAASARSDRQNLHLQAWVFSSSAVLNPFYKEWVRIINKLPL

SEQ ID NO: 116 - protein, 209 aa, Homo sapiens
  SITE (123): Xaa equals any of the naturally occurring L-amino acids
  SITE (133): Xaa equals any of the naturally occurring L-amino acids
  SITE (203): Xaa equals any of the naturally occurring L-amino acids
  SITE (207): Xaa equals any of the naturally occurring L-amino acids
GTRAKRPLKTTPVAKYPKKGSQAVHRHSRKQSEPPANDLFNAAKLPKVTCRDVLPEIRAICIEEIGCWMQSYSTSFLTDSYLKYIGWTLHDKHREVRVKCVKALKGLYGNRDLTARLELFTGXFKDWMVSMIXDREYSVAVEAVRLLILILKLFYPECEIRTMGGREQRQSPGAQRTFFQLLLSFFVESKVTYTERTLGCCAXDYNXLG

SEQ ID NO: 117 - protein, 431 aa, Homo sapiens
  SITE (205): Xaa equals any of the naturally occurring L-amino acids
CPPECRWCVARLALRESWGLLPERYGYVDRNRIFGCDPPYYAVLEGEQFTSGVSTLQEETTVSLNTVDSIESFVADINSGHWDTVLQAIQSLKLPDKTLIDLYEQVVLELIELRELGAARSLLRQTDPMIMLKQTQPERYIHLENLLARSYFDPREAYPDGSSKEKRRAAIAQALAGEVSVVPPSRLMALLGQALKWQQHQGLLXPGMTIDLFRGKAAVKDVEEEKFPTQLSRHIKFGQKSHVECARFSPDGQYLVTGSVDGFIEVWNFTTGKIRKDLKYQAQDNFMMMDDAVLCMCFSRDTEMLATGAQDGKIKVWKIQSGQCLRRFERAHSKGVTCLSFSKDSSQILSASFDQTIRIHGLKSGKTLKEFRGHSSFVNEATFTQDGHYIISASSDGTVKVKYLLSVYFGMSTPSLSFEEFSVVIMGMIVL

SEQ ID NO: 118 - protein, 331 aa, Homo sapiens
ALRHSRELPGLAGVGYPYHRNAGTIASSRPLLSAEPLWSCDSENQNFLCLLLAALTFLLCKAIQNTSTSLHLQLSLCLFLAHLLFLVGIDRTEPKVLCSIIAGALHYLYLAAFTWMLLEGVHLFLTARNLTVVNYSSINRLMKWIMFPVGYGVPAVTVAISAASWPHLYGTADRCWLHLDQGFMWSFLGPVCAIFSANLVLFILVFWILKRKLSSLNSEVSTIQNTRMLAFKATAQLFILGCTWCLGLLQVGPAAQVMAYLFTIINSLQGFFIFLVYCLLSQQVQKQYQKWFREIVKSKSESETYTLSSKMGPDSKPSEGDVFPGQVKRKY

SEQ ID NO: 119 - protein, 252 aa, Homo sapiens
GGQEVETKRFDKVSNRMRLQGMKMVSASSISDPIIQLIASLALAFVLYAASFPSVMDSLTAGTITVVFSSMIALMRPLKSLTNVNAQFQRGMAACQTLFTILDSEQEKDEGKRVIERATGDVEFRNVTFTYPGRDVPALRNINLKIPAGKTVALVGRSGSGKSTIASLITRFYDIDEGEILMDGHDLREYTLASLRNQVALVSQNVHLFNDTVANNIVTHGLNSTAVSKLKKRRVWPTPWTSSIRWITVSIQ

SEQ ID NO: 120 - protein, 176 aa, Homo sapiens
  SITE (129): Xaa equals any of the naturally occurring L-amino acids
  SITE (130): Xaa equals any of the naturally occurring L-amino acids
  SITE (145): Xaa equals any of the naturally occurring L-amino acids
  SITE (156): Xaa equals any of the naturally occurring L-amino acids
  SITE (158): Xaa equals any of the naturally occurring L-amino acids
PKQILSQGPTALDNVTKTSLFHPTAVTFAGKWSSGHGQPCRSSMPPLAVSEDRWQPCSPCPSRSFPPTLICMVWAPLGPPRTDCLTLLHTPSKDSPKMSLEWLVAWSWSLGWPEGLHRHRHPVRAGLRXXRCHHCGCLLVLFCGXVITGQEQPRPXVXVNSLMQAADAKRGCRMAN

SEQ ID NO: 121 - protein, 119 aa, Homo sapiens
  SITE (102): Xaa equals any of the naturally occurring L-amino acids
  SITE (119): Xaa equals any of the naturally occurring L-amino acids
RDVATGRKWLWESGATGSSATPLPPHLTSCPHLCPIPCSHLLVTSDGGGFCSPPPQSQAGVQAPRTPSWESLLPSHCHLCASLGSPISEAPHLWFWVSLCSXHLGFLDSMCQGPKGVSX

SEQ ID NO: 122 - protein, 210 aa, Homo sapiens
  SITE (5): Xaa equals any of the naturally occurring L-amino acids
ISGAXLANAGLDYYNHNLDTSPEFYGNIITTRTYQERLDTLEKVRDAGIKVCSGGIVGLGETVKDRAGLLLQLANLPTPPESVPINMLVKVKGTPLADNDDVDAFDFIRTIAVARIMMPTSYVRLSAGREQMNEQTQAMCFMAGANSIFYGCKLLTTPNPEEDKDLQLFRKLGLNPQQTAVLAGDNEQQQRLEQALMTPDTDEYYNAAAL

SEQ ID NO: 123 - protein, 137 aa, Homo sapiens
LSLFGNLVIMVSISHFKQLHSPTNFLILSMATTDFLLGFVIMPYSIMRSVESCWYFGDGFCKFHTSFDMMLRLTSIFHLCSIAIDRFYAVCYPLHYTTKMTNSTIKQLLAFCWSVPALFSFGLGVFSLPPLCFQAHG

SEQ ID NO: 124 - protein, 131 aa, Homo sapiens
  SITE (103): Xaa equals any of the naturally occurring L-amino acids
DLTAQVLPFCVLQMDTRSGSQCSVTPEAILNNEKLVLPPRISRVNGWSLPLHYFQVVTWAVFVGLSSATFGIFIPFLPHAWKYIAYVVSFSSWHGLSGKGSWXNLRWTWLWGLGHGCPVAPVTCPGPDYVP

SEQ ID NO: 125 - protein, 180 aa, Homo sapiens
  SITE (154): Xaa equals any of the naturally occurring L-amino acids
  SITE (155): Xaa equals any of the naturally occurring L-amino acids
  SITE (169): Xaa equals any of the naturally occurring L-amino acids
  SITE (175): Xaa equals any of the naturally occurring L-amino acids
VNAGQVVTGNLAPHFLALCKPNYTALGCQQYTQFISGEEACTGNPDLIMRARKTFPSKEAALSVYAAMYLTMYITNTIKAKGTRLAKPVLCLGLMCLAFLTGLNRVAEYRNHWSDVIAGFLVGISIAVFLVVCVVNNFKGRQAENEHIHMDNLXXMPMISIPRVESPLXKNPITXFAEVT

SEQ ID NO: 126 - protein, 145 aa, Homo sapiens
  SITE (9): Xaa equals any of the naturally occurring L-amino acids
  SITE (85): Xaa equals any of the naturally occurring L-amino acids
VPMATAGAXPRGGQSEWGCGAPGASAAAWRCSRLAAVFTFTLPPSVPGGDSGELITAAHELGVAHPPGYPLFTLVAKLAITLFPXGSIAYRVNLLCGLFGAVAASLLFFTVFRLSGSSAGGILAAGVFSFSRLTWQWSIAAEVLA

SEQ ID NO: 127 - protein, 143 aa, Homo sapiens
  SITE (19): Xaa equals any of the naturally occurring L-amino acids
  SITE (83): Xaa equals any of the naturally occurring L-amino acids
GPHPPGCRSFFPLLTYFFXGGVHQMVPGTFAVISILVGNICLQLAPESKFQVFNNATNESYVDTAAMEAERLHVSATLACLTXIIQMGLGFMQFGFVAIYLSESFIRGFMTAAGLQILISVLKYIFGAGQEPTHSWPRSIAFL

SEQ ID NO: 128 - protein, 150 aa, Homo sapiens
  SITE (47): Xaa equals any of the naturally occurring L-amino acids
  SITE (147): Xaa equals any of the naturally occurring L-amino acids
  SITE (149): Xaa equals any of the naturally occurring L-amino acids
AEKESALLNKLSILASKLAPAMKTQKLRYRRCSSELLPMAKSYKRLXYKRLLDGFSSSTEQLNPYLAASGWDKRPNSKPMALYSLESIKMTFIDLSNKMPSLLFGSEIFPVILSCEIIQLRLHDESSRTFPEHCAPGKACLRRGLQXPXK

SEQ ID NO: 129 - protein, 220 aa, Homo sapiens
MELLTQLLQALWAQDFETLANPSMIGMLYFVLFVILFLENGLLPAAFLPGDSLLVLVGVLIAKGAMGYPQTILLLTVAASLGCWVSYIQGRWLGNTRTVQNWLSHLPAHYHQRAHHLFHKHGLSALLIGRFIAFVRTLLPTIAGLSGLNNARFQFFNWMSGLLWVLILTTLGYMLGKTPVFLKYEDQLMSCLMLLPVVLLVFGLAGSLVVLWKKKYGNRG

SEQ ID NO: 130 - protein, 114 aa, Homo sapiens
  SITE (104): Xaa equals any of the naturally occurring L-amino acids
  SITE (110): Xaa equals any of the naturally occurring L-amino acids
  SITE (114): Xaa equals any of the naturally occurring L-amino acids
LFPSGDRLIQVMDILGQPSTCPLSSVIPIEIGPLTEEHVFFISPESPINLLVRDLLCNLIATIFCTVDGSVCGSLLGKRHLDLGYYILLERKEVWPEMGISYVXENPHKXKQVX

SEQ ID NO: 131 - protein, 180 aa, Homo sapiens
  SITE (12): Xaa equals any of the naturally occurring L-amino acids
  SITE (36): Xaa equals any of the naturally occurring L-amino acids
  SITE (86): Xaa equals any of the naturally occurring L-amino acids
  SITE (103): Xaa equals any of the naturally occurring L-amino acids
  SITE (153): Xaa equals any of the naturally occurring L-amino acids
GIGELKGFSGAXISLSSPALPLATAGCCLAFGESLXLSRRGFLSAFLPYPQCVMGTALQWMNLTCLGESLLLLLPCFLCSVGYFLXLWEDLVYLGRVFLSSPXLAPAFSVRLPSTQWRLGGYRLVLFLGYLVILLCYANPYTIIQNLFKDRLXSPFLFCAPSNMSLGTKAAVGLFSLGRA

SEQ ID NO: 132 - protein, 135 aa, Homo sapiens
  SITE (38): Xaa equals any of the naturally occurring L-amino acids
  SITE (75): Xaa equals any of the naturally occurring L-amino acids
  SITE (91): Xaa equals any of the naturally occurring L-amino acids
  SITE (92): Xaa equals any of the naturally occurring L-amino acids
  SITE (116): Xaa equals any of the naturally occurring L-amino acids
  SITE (126): Xaa equals any of the naturally occurring L-amino acids
LMPAMSSELDGAFLLLYLRKTIIAMWAVFLVPYNKHGXVCLFSFQKCVRFPSCSVVCFLLKFLTICFKQHCYICXQRIQKSFKNRTTYIPXXALKKLPGIMALKFTKTWRPYYGVXCWPFCEWNHXDRHEASYTG

SEQ ID NO: 133 - protein, 203 aa, Homo sapiens
  SITE (2): Xaa equals any of the naturally occurring L-amino acids
  SITE (23): Xaa equals any of the naturally occurring L-amino acids
  SITE (192): Xaa equals any of the naturally occurring L-amino acids
AXTGLPLVGQHSALHRGLIGVPXPTALAAYQHYILAKVENLQPEIKTIARHLNQEVAVRANQLGWSKRDARLTYLKNMRRLISELYVRDNCHPFKATVLVWIQLPMWIFMSFALRNLSTGAAHSEGFSVQEQLATGGILWFPDLTAPDSTWILPISVGVINLLIVEICALQKIGMSRFQTYINVLCPCNVGXDDTNCCNGTLI

SEQ ID NO: 134 - protein, 354 aa, Homo sapiens
LVTDAESILHFAEIGVVLMLFIIGLELDPQRLWKLRAAVFGCGALQMVICGGLLGLFCMLLGLRWQVAELIGMTLALSSTAIAMQAMNERNLMVTQMGRSAFAVLLFQDIAAIPLVAMIPLLATSSASTTMGAFALSALKVAGALVLVVLLGRYVTRPALRFVARSGLREVFSAVALFLVFGFGLLLEEVGLSMAMGAFLAGVLLASSEYRHALESDIEPFKGLLLGLFFIGVGMSIDFGTLLENPLRIVILLLGFLIIKIAMLWLIARPLQVPNKQRRWFAVLLGQGSEFAFVVFGAAQMANVLEPEWAKSLTLAVALSMAATPILLVILNRLEQSSTEEAREADEIDEDSRA

SEQ ID NO: 135 - protein, 358 aa, Homo sapiens
SGGPLLDRKGPRLMLGLGMFFWSLFQAMSGMVHNFTQFVLVRIGMGIGEAPMNPCGVKVINDWFNIKERGRPMGFFNAASTIGVAVSPPILAAMMLVMGWRGMFITIGVLGIFLAIGWYMLYRNREHVELTAVEQAYLNAGSVNARRDPLSFAEWRSLFRNRTMWGMMLGFSGINYTAWLYLAWLPGYLQTAYNLDLKSTGLMAAIPFLFGAAGMLVNGYVTDWLVKGGMAPIKSRKICIIAGMFCSAAFTLIVPQATTSMTAVLLIGMALFCIHFAGTSCWGLIHVAVASRMTASVGSIQNFASFICASFAPIITGFIVDTTHSFRLALIICGCVTAAGALAYIFLVRQPINDPRKD

SEQ ID NO: 136 - protein, 253 aa, Homo sapiens
RNMENLALTTLLLPFMAHWSFRFRHNVGPPNGGVLFAALTTLCMLSLISAFYQADKVAVTLTLVNVGDVALFGLVIDRVSTLILFVVVFLGLLVTIYSTGYLTDKNREHPHNGTNRYYAFLLVFIGAMAGLVLSSTLLGQLLFFEITGGCSWALISYYQSDKAQRSALKALLITHIGSLGLYLAAATLFLQTGTFALSAMSELHGDARYLVYGGILFAAWGKSAQLPMQAWLPDAMEAPTPISAYLHAASMVK

SEQ ID NO: 137 - protein, 116 aa, Homo sapiens
KWMHLELEMAQDDPSYNGAITVCCNEKNYSFSLACNAKRLNCFPVLMDIVSNGLLGMVKPSVHIRTERSTFLEVNIYNLTIPDSPLSGISQITLLSAGILFLLSKPLHNKLTFGLI

SEQ ID NO: 138 - protein, 298 aa, Homo sapiens
PVYSQSWHKFWFRWQRRWLQPDKRGKVVGTIMSGLLLGILLARTVAGLLANLGGWRTVFWVASVLMALMALALWRGLPQMKSETHLNYPQLLGSVFSMFISDKILRTRALLGCLTFANFSILWTSMAFLLAAPPFNYSDGVIGLFGLAGAAGALGARPAGGFADKGKSHHTTTFGLLLLLLSWLAIWFGHTSVLALIIGILVLDLTVQGVHITNQTVIYRIHPDARNRLTAGYMTSYFIGGAAGSLISASAWQHGGWAGVVWLARRLPCLTYWSGGEVFIVRKPQIKQSATVFVALHL

SEQ ID NO: 139 - protein, 226 aa, Homo sapiens
RYCRLGAINAFNMVDGIDGLLGGLSCVSFAAIGMILWFDGQTSLAIWCFAMIAAILPYIMLNLGILGRRYKVFMGDAGSTLIGFTVIWILLETTQGKTHPISPVTALWIIAIPLMDMVAIMYRRLRKGMSPFSPDRQHIHHLIMRAGFTSRQAFVLITLAAALLASIGVLAEYSHFVPEWVMLVLFLLAFFLYGYCIKRAWKVARFIKRVKRRLRRNRGGSPNLTK

SEQ ID NO: 140 - protein, 150 aa, Homo sapiens
  SITE (116): Xaa equals any of the naturally occurring L-amino acids
  SITE (138): Xaa equals any of the naturally occurring L-amino acids
  SITE (141): Xaa equals any of the naturally occurring L-amino acids
QRYFRAQVLYVSGNSAEVFFVDYGNKSHVDLHLLMEIPCQFLELPFQALEFKICKMRPSAKSLVCGKHWSDGASQWFASLVSGCTLLVKVFSVVHSVLHVDVYQYSGVQDAINIRXRPHPAGLCRAHGGVLRVPSKAXEVXQGASFSKFS

SEQ ID NO: 141 - protein, 103 aa, Homo sapiens
  SITE (38): Xaa equals any of the naturally occurring L-amino acids
LPMWNGLWVLVPLLGHRGKLQGFCCDIEGRHQPSKTFXSYPLGILLFGQSWSIGKLMGICQSFFVSFGSCLASIGRVFGVILRKELQWFGGVFCSGPSFGNRC

SEQ ID NO: 142 - protein, 152 aa, Homo sapiens
  SITE (121): Xaa equals any of the naturally occurring L-amino acids
KAFSTKQKLIVHQRTHTGERPYGCNECGKAFAYMSCLVKHKRIHTREKQEAAKVENPPAERHSSLHTSDVMQEKNSANGATTQVPSVAPQTSLNISGLLANRNVVLVGQPVVRCAASGDNXGFAQDRNLVNAVNVVVPSVINYVLFYVTENP

SEQ ID NO: 143 - protein, 337 aa, Homo sapiens
GTSRGGRMKLIDYGLSGYQEESAEVKAMDFITSTAILPLLFGCLGVFGLFRLLQWVRGKAYLRNAVVVITGATSGLGKECAKVFYAAGAKLVLCGRNGGALEELIRELTASHATKVQTHKPYLVTFDLIDSGAIVAAAAEILQCFGYVDILVNNAGISYRGTIMDTTVDVDKRVMETNYFGPVALTKALLPSMIKRRQGHIVAISSIQGKMSIPFRSAYAASKHATQAFFDCLRAEMEQYEIEVTVISPGYIHTNLSVNAITADGSRYGVMDTTTAQGRSPVEVAQDVLAAVGKKKKDVILADLLPSLAVYLRTLAPGLFFSLMASRARKERKSKNS

SEQ ID NO: 144 - protein, 329 aa, Homo sapiens
WTLCGPEAGMVGYDPKPDGRNNTKFQVAVAGSVSGLVTRALISPFDVIKIRFQLQHERLSRSDPSAKYHGILQASRQILQEEGPTAFWKGHVPAQILSIGYGAVQFLSFEMLTELVHRGSVYDAREFSVHFVCGGLAACMATLTVHPVDVLRTRFAAQGEPKVYNTLRHAVGTMYRSEGPQVFYKGLAPTLIAIFPYAGLQFSCYSSLKHLYKWAIPAEGKKNENLQNLLCGSGAGVISKTLTYPLDLFKKRLQVGGFEHARAAFGQVRRYKGLMDCAKQVLQKEGALGFFKGLSPSLLKAALSTGFMFFSYEFFCNVFHCMNRTASQR

SEQ ID NO: 145 - protein, 151 aa, Homo sapiens
GRGDWQAGPSSSVRRTQAIRRRHNAGSNPTPPASVMGSPPSSLQEAQRGRAASHSRALTLPSALHFASSLLLTRAGANVHEACTFDDTSEGAVHYFYDESGVRRSYTFGLAGGGYENPVGQQGEQTANGAWDRHSHSSSFHSADVPEATGG

SEQ ID NO: 146 - protein, 329 aa, Homo sapiens; identical to SEQ ID NO: 144

SEQ ID NO: 147 - protein, 383 aa, Homo sapiens
  SITE (266): Xaa equals any of the naturally occurring L-amino acids
RGPGLLRCGLEGWARGRRRSRQLETMVDHLANTEINSQRIAAVESCFGASGQPLALPGRVLLGEGVLTKECRKKAKPRIFFLFNDILVYGSIVLNKRKYRSQHIIPLEEVTLELLPETLQAKNRWMIKTAKKSFVVSAASATERQEWISHIEECVRRQLRATGRPPSTEHAAPWIPDKATDICMRCTQTRFSALTRRHHCRKCGFVVCAECSRQRFLLPRLSPKPVRVCSLCYRELAAQQRQEEAEEQGAGSPGQPAHLARPICGXPVEMTMTPTRTRRAAGTATGPAAWSSTPRGWPGLPSTADPRPAEHLSPSQLHCPGPQEGSSRSCPGLRDPIPWWQVQRWGVALSGLPVPFCWTLCPYGFTAGNAFPFRKPQNTHRSW

SEQ ID NO: 148 - protein, 132 aa, Homo sapiens
RSRRHSSLPSCCPPQEASMASPTSTNPAHAHFESFLQAQLCQDVLSSFQELCGALGLEPGGGLPQYHKIKDQLNYWSAKSLWTKLDKRAGQPVYQQGRACTSTKCLVVGAGPCGLRVAVELALLGARVVLVE

SEQ ID NO: 149 - DNA, 1140 bp, Homo sapiens
aaacaaagtatttatgtctgttgtatagtatggatgcttgctcttggtggattcctaactatgattattttaacacttaagaaaggagggcataattccacaatgtgtttccattacagagataagcataacgcaaaaggagaagccatttttaacttcattcttgtggtaatgttctggctaattttcttactaataatcctttcatatattaagattgggaagaatctattgaggatttctaaaaggaggtcaaaatttcctaattctggtaaatatgccactacagctcgtaactcctttattgtacttatcatttttactatatgttttgttccctatcatgcctttcgattcatctacatttcttcacagctaaatgtatcatcttgctactggaaagaaattgttcacaaaaccaatgagatcatgctggttctctcatctttcaatagttgcttagatccagtcatgtatttcctgatgtccagtaacattcgcaaaataatgtgccaacttctttttagacgatttcaaggtgaaccaagtaggagtgaaagcacttcagaatttaaaccaggatactccctgcatgatacatctgtggcagtgaaaatacagtctagttctaaaagtacttgaggtaaacatactaaaatgaattatataatgcagcctcttaattctttgaagaactaaaaaattaggaaacaaagttctagcatttacaaaactcagatctcaaagctctgcttgtatttgtgatatttcatttgcttaactgtaaaccatttcaaggtactaacttttaaatctgtatgtaaaatcttttcaaaatacatttttaagctaatactcttaacatagattatgaagttaagtgaaatttatggctctaacagcaaaataattaaagtgccatagtttctcaagtgactaaagtagttattaaaatcaagcacttgatactaatttgaagtgtgtttaaaagtaaatgatttgggaactgacaatgtgtcagaaaatatatgttcatttatcattttaaaatcttgtataatttgccactgtattcatttatgcctaaatctctataacagatgaaaagataattaataaaatcctaattaaaaaatgaga

SEQ ID NO: 150 - DNA, 6312 bp, Homo sapiens
  SITE (6195): n equals a,t,g, or c
cagttaatgcaattttgaagcatgccctgaatagattcagtcattatcaagtcaaactaaaaacggtgaaaggttgcgactattaccaaataggtatgtatttcaacatagcaatgtgatattttcacaaacatacccaaactgcattttaaaagcttctgctcatctggagtcacagtggaatctgttgggtcctgccctctgggtccagtactcctacatgagccagttgaaaaaaaactgcaggagtaggtggtggtgcgggggtacaatgcactaatactaggtttttgaacttgtgaataggatttgccaagtaacaacatttaaaaaacactatctactattacaaaactattgtgaccacttcaatatagcacatgggtcacaagtaatgcccactgggaaattaatcccctatgtaaacacagtggtttgtttcttgtcttcacaagcaattcttaacatatcaaacaggtagtttaaaaaatatcagtaaatagccttatatagtgaatgacattgtaatgtactaaccaacttcaaaggagaaaaaaaaacagtcaccaagtttaaaacagaatgtaattgtgatttttaattaaaaaaaaaatttttttttgagacagactctcgctctgttgcccaggctagagtacagtggcatgaacacagctcactgcagcctctgtctcccgggttcaagcaattctccagcctcagcctccggagtagctgggactacaggtgcgtgccaccacgccctgctaatttttttttttttttttggtattttttagtagaggcagggtttcgctatgttggccaggctggtctcgaattcctggactccagtgatttgcctgcctcggcctcccaaagtgctgggattacaggcatgaaccactgctcccggccaattttttttttttttatgttctttttttttgagacaaggtcttactccgtcacccaggctggagtacagtggagtgatctaggatcactgcaacctctgcttcccaggctcaagcgatcctcccaccttagcctctcgagtagctgggactataggcgcacgtcaccatacccgctaatttttatactttttgtagagacagggtttcaccatcttgcccaggctggtctagaactcctgaactcaagtgatcctcccacttcagcctcccaaagtgctgggatcacaggcatgaaccatggcgctcagctgtcaatttgtgaatcaataattgtatgctagctgtctaatacatagttctaaatgatggccactattataacataaacaaatgcactggctttgctttatgctctttaaactgaagactaaagcaaaaccagaaatgcttactgacagatttgtccaactattacttattttatttgcagattagagctgaggcaaatggtttcaggatatgtgctttgtgctaacagctttctggagacatcttgattatggctatcgggtctagaagtttaaaaagatatgctctgtgggtagtggcaatcattctgatgaatgatttgtgattctgtaaactctggatttacttccttataataatggacatagcaaataagattaataccctttccaaagaagtaaagctagatggcataacctgttcttaaaattgttaaagtgtatgttaaaggaatcatgtcaaaatactgctgatagaactcaatattaataaagaaaatgctgaccctatgtgataaggagtgagatttggtgaaaagcatcatgggctctaaaagtcagatctgagtcctaacttgggcactgtcatttaagagttgtgtggcctgccgggtgcggtggctcacgcctgtaaccccagcactttaggaggcagaggcgggcggaaaatgaggtcaggagttcaagaccagcctggccaacatagtgaaactccgtctctactaaaaatacaaaaattagctggatgtggtcccagctacttgggaggctgaggcaggagaactgcttgaactcgggaggcggaggttgcagtgagctgagaccatgccattgcactccagcctgggtgacagagtgagactctgtctcaaaaaaaaaaaaaaaaaaaaaaaaagagttgtgtggccaagagtaaagatcataacctcttgaactttctttctttcttcctttttttattttagagacaggttcatgctatgttgccttggctggcaggctggtcttgaactcctggtctcaagtgattctccagcctcagtctcccaaagtgttggggttcccacgcgtgagccactgtacctggccaaccttttgatctttcattacctcttttgtgatacctacctcacagagtattgcaagaattatgtaaaggaagtaatataaatgtgtttaacacagtgtctggtacacagaaagtactaaataaatattagttaatggtttggccatctagcttaagagttcaattctgactgcacattaaaatcccctaaggagcttttaaaggaaaccagtgcctgaaacccattccagaccaattaaatcagaatatctggggaaggagccaagcactggtatctttaaaaaaccctcaagaggattctaatatgcagccaggattgagaaccactgataatcccttctacaaagaacccaattggtggtagtctcaaaaatctccagtggtaagatccttatattgcctcccaagagagatcatttcattagaaaaaaatgatttccttaaaaggaggcaacatctgtctctgcaatttctatcattggttcttgttttgctttgtgaagacacatataacaaagtgaaacccttttctctatggctttgtaaagcattctcatctccagggtaacgtgcctatttccttcaacttgcttctttgacatgatttgagttcttctctccatttggtccatggccttttctaagtgtgctgctgtggatcaaacactgcattccaggtgagaccctaccagcctgggacagaagcagcatagtagtaacaattttcatttcagacatcacgtatctaggaattcaactaaagatgggtttttcgttgccaccacactacgctagtgatagagcaattgcaattgtgtttgttaatgcagctaaagctcttcctgtacttgtacagctgcttttaatatccacatgtagaacttcatatacatttctactaaattccctctttgatttaataatatttattatgctaagcattaggtacagagagccgaacaaaattgacttggttcttaatcctaatggaacttaaattctaacatgagagaagaaaaaaaatccaaaataactactcacaggtgagtttttcacgtcatttcagctacttgagctctcaaaatcacattacttcttgtgcctcaattccctgaacctatgagagctccctacataaccacacaatataggtggttcctctacagacacccttttccttttcctggtaatgcaggttgcattatcagtttcatttttggtagcctgacattctttctagattgccctttccttttagaatcttagatcacaggttgggcatagtggctcacacctgtaattccagcactttgggaggccgaagtgggcagatcacctgaggtcaggagttcgagaccagcctggccaacgtggtgaaaccccatctctactaaaaatacaaaaattagccgggcatggtggcgggcgcctgtaatcccagctactcgggaggctgaggcaggagaatcgcttgaagccagggggcggaggttgcagtgagccgagatcacgccattgcactctagcctgggtgacaagagcaaaactctgtctcaaaaacaaaacaaaacaaacaaacaaacaaaaaccagaatcttagatcacaagaaacatgcctatacctttctataaactttctgaaatttgtcttcctgcagttgagacacatgacagactagactcagtccttccccgctcccttcctttctccctccactttcctgaattctggaaacaggctcttaccagggattacataacttcctcttcaccagccagttcctcttctgtggaatcaatgctccccaactttacaacattttaaatcttaatgttaccctctaccaaaatgctttgtttttaatcaaattatgtgtagagctttaagaaaggctatttttctctgtgtataagatcaaatcagggacttaatttatgtaattcaaatccactttgcatggtagcagtcagggtttgaatgtccactcctccaaaatgtttactaatagggtctctgtcttattcaccttcctttcccacacagtacttagccaagtgtgagatatttactaaaatgagattaatcaaaaggtgtttattaaagctaacttttattaagcagtcactatgtgccaggattaagttcttcttatgcatttttcattttcacaaatgagaaaactaaggcatagaaaagattaagttatttgcccttggtcacaagttagttgggtctgattttgagaaccttgctctgggcatctttatgttaaccctgctaagtggctgctgtagagaaatagggcagtcactctatgagaggaatgtgatgagacctccagaaatgctttctttacttgttatgaccagctctcagactaagctctttacagcagtcaatgggccaataataagtagctttgcaaatattctctgctgccacaaacaagtagaattcaaacactatctcttcgaaggttctagcaagtctcaaattattgaacccagggcacatttaagctttggtcaggttactttcaaaatcttggattgcacatgctgtttcccatctacgttattactctatgcttctaggttaggagtggctaactggcagctgccagctaacttggttttgtttggttacttttttctcctgtccagtgatacaagagtctgtgtaaccttgcaggtgctgtattctcttagtctattatgttaattgcatgccctaagacccctaccttggtcttaggctgaaaagaaatttaggatcctcttctttattcccacttatagaatgagaccaccacaagtcacacgccatgtagcaatacatgtcaaaatgaatgaatgccacatatgagggaaaaagtcaaggcaggaagtggttctgaagctgggcagggccagcagtgggcccagctctcttatggctgtacatacctttagagaaactgatgctcatctttgagaaatatgagctgtcatttctcttcaccaccatctgtattcccataagaacttccctaagagaagatgatctcataaattgagttattttaatataatacatgaaacagaacttcaatgtaggccatggccacaggaaaggttagagcatgaaactccatgagataccacactatgtgctgcttgtttaatgatacaataatgttactacatacagtaggataaaagtaaagtttctcgcaatgtctgaaaataaatcatttattatttacactgtcttttttttttttttttttttaaagagatggggtcttgttctgttgcccaggctggagtgcagtggctcaattatagctcactacagccttgaactcctgggttcaagcaatccttctgctgtagcctcccgagtagctaggaccataggcgtgtgctgggaagcccagcctattatttacacttttagttaaagtaactgttattaaaatagcaaatgactcaatgtttggcattccgttgtaggaaaaatctgaagacataagaactacacatgaggaatatgtcatttagcactttcactttttgatctccacagaagacaatgagaagtcataccataacaatgacgacaacttcagtcagcagctggccttactcctcccacagaatgcgctttataaccaatcatagcgaccaaccgccacaaaacttctcagcaacaccaaatgttactacctgtcccatggatgaaaaattgctatctactgtgttaaccacatcctactctgttattttcatcgtgggactggttgggaacataatcgccctctatgtatttctgggtattcaccgtaaaagaaattccattcaaatttatctacttaacgtagccattgcagacctnctactcatcttctgcctccctttccgaataatgtatcatattaaccaaaaacagtggacactaggtgtgattctgtgcaaggttgtgggaacactgttttatttgaacatttaattt

SEQ ID NO: 151 - DNA, 1701 bp, Homo sapiens
ccagaatgtcatgtcaatgcaataacatctattgagactggcctcattcacatagcataatgtctttgagattcttcttgctgcatatagcaatagtcctttgctttatagagctgatagtattccactgtatggatgtaacatgctttcaaccactggaggacttttgtgttgtttctagttttgggtgattatgaataaggctgctataaacatttgtgtcagactttaaacaccctaaatttctttaggttatttctttaaggtaaatgcctagtagtgggattcttgggtcatatgttaagtgtatgcttaactttataagaaagtgccacattattttccagaatggctgtaccattttgtattctcaccaacaatatagagttgtcagttgttccacaccctcaccagcacttgatatcgtcagtatttatcccagccactctaatgggtatgtaatatcccactgtggtttaattcacatttctttaatggctgatgatgttgaacatctttttatgtgcttatttgccacctgtagtaaaaagacctggatattttggtggagtaaaaagacctgggtactttgctgaagtatccaagtctttttactacttttcttttttctttttttttgagacagagtctcactctgtcacctaggcttgagtgcgatggctcaatctcggctcactgcaacttctgtcactcagttcaagcagttctgcctcagcctcccaagtagctgggattacaggcacccgccaccatgctcagctaatttttagtattcttcatagagatggggttttgccatgttggccaggctggttttgaattcctgactttaggtgatccacctgccttggcctcccaaagtgctgggattacaggtgtgagccactgcatctggctgtctttttactacctttcaattgggttgtttgctttctttctgttgagttttgagaattctttacacattctggagtagtttccctgatttgcaaatgctgcttgatggttcccaggtgccagagcagtgctgggtatggaagctgtagcccaagtgaagatggcctgcaggagcctcctgacagggctgaggccagccggccagcaagctgttgttacctctgagtgggctgagggcacacaggacatgtctgctccagccttgagtgtccagcatgactttccagatgaggcgttcctgagccagggtttatcgaaactccttgcccagttgtctgtggttattccacttccacaggtctcattggttccttgccccactccagccaggctgcacactcgccagtcctccgtcgcagtgatccacctctcgcctgggcaggaatcagtgctcagcccttacctgagtgcattgtcagcagcaccccactccatttctggctacgcctgtcctggcacactttctttcccagccttctttccctgcctgcacaccctcctgatgcttcttccatctcctccgttgctctttctgcatctcctttgtaggaggcggtggtcttctccagaagaaccctgaatgcacaactgtactcagatttctgtctttaatcccctactctattctctctcagtcccctaggtcatcttggtaagaaccatgtctttaaatattaggaatgtgtttggttggacctctctcctgcttcttgacacaggcac

SEQ ID NO: 152 - DNA, 203 bp, Homo sapiens
tcccatcattctatttttttttttttttttttgagatggagtttcgctcttgttgcccagactggagtgcagtggcatgatctcggctcactgcaacctccgcctcccaggttcaagcgattctcctgcctcagcctcctgagtagctgggattacaggcatacaccaccatgcctggctaatttttgtatttttagtagaga

SEQ ID NO: 153 - DNA, 722 bp, Homo sapiens
tttgtatttttagtagagacagggtttcacagtgttagccaggatggtctcaatctcttgaccttgtgatccgcccgcctcggccccccaaagtactgggattacaggcatgagccaccgcgccgggcctagtcttgacctcttttaaactccaaattcgcacccccaactgccaactaccacctgtggtcctgccatttgtccccagatcagattggaatggtacatctgcttgaccaagcctggatcacatgcctaggctctagctgcaaggagagcccagaaagtacctgtgtttttagcttctgtagtagcatagaagtacaacctcccaccaaaacccaggaggtggtccagtccccaggcagttcggatgctccctccgcattgtgcttctgctgccttacctctatcggtggcctcattaaactcctaggcccccaggttcaactcctgaacattttcctggacttgtccccacatccaaatcagccacatcaaaacccatcacttcttcctgtgtagcacctctcatccattcccttccctctggtacccctgcctccatgtcagcacattcattcagcaggcactgagggtctcctgtgtgccaggagctatgctcaaggggagtgtggaatacaacgctgctctgaggaactggcagtctactgggtgaggcagacacatgaatgattagaagacggtctggaaagcattgt

SEQ ID NO: 154 - DNA, 722 bp, Homo sapiens; identical to SEQ ID NO: 153

SEQ ID NO: 155 - DNA, 380 bp, Homo sapiens
gggctgaggcttcagaaagaaagaggcaggggtaggaggcaaggctgtgggaacggaagcggagggtgagggaggccgccatcttaggtaactggcgcctgtaagatggctgcctgaccaggtgtgcactgaaagcctaccctggttggtggacatggaacagactgaggccataagaaggacttcctggctgaccagaaatactgttgaatcttcctgttaatggaattaggaagagaggatggagagagaaggaaggagggagagaccatgaatggcggcccccagaagagatgtaaggttgagcacaggagcaggggtggtagagaggcctcagcactgggcttagttcccagactacttagaggactgtgggtaat

SEQ ID NO: 156 - DNA, 380 bp, Homo sapiens; identical to SEQ ID NO: 155

SEQ ID NO: 157 - DNA, 512 bp, Homo sapiens
cagggagtctgctgggaggagaagggaaacagaggtaggaattcccctgtaaagcgccttatgtgctataccagggaggctggggcagttagctgacagcctcagaggtgccaggtgtagggcatggctggaaagcaacacataaccactcctaggagggatggggactcctgcatctggctgtccattgagaccagccagacatttaactggctctcagctagttccaaacaaatgaaggacatatgaaagacctggaagccacttgaggaagggatgtctctaccacccaccttcagaatccctccttcccccacgacatgcgggggcagcaagcttatgggagctttctggggagagatgtggagaagcagaagttggtgtccctcagcacaatgagcaccctgatgtcggggcagggggatgggctgctgggggttgggggacagggatactggctctgactttgtggggcaacaagctagtctctgagctctcttatgaaaaaaaaa

SEQ ID NO: 158 - DNA, 1394 bp, Homo sapiens
tggggctggggaggaaaggagcttcaatgtgccattctggttggggagaggataggacatttctgggtccttggctgctgccggtagaggtatggggaggaaaaactctagagtgggagatgtggaagtggaaaaggaaggccctgtccaggcctggcctggtttctggagacagaaaactccccaggggacagagaggttacccccttgtgcttagcttctgccacccttcccttctctggaggagaaggctgccctctcctcagcaaccctggcctttattctatgcataaccactgcaagggcacccctggccaggctgaatgggtgggggtcccagggcacctgcaataatctcagaatggagggtatcctgggacaaagagggggtacagaaggtgccaggggggaaaaggtgattcctccatctctctctcacccaaatccccccagatcgaatctgacccttttccctggtctccattgtgctaaaccaccgaacttggaggagcctcatataaacatagcccccagccccactggctttccgaacccatcatgaaatagctggaaggtatctgaaccgttcccatagctccctcattattttcttccctgaggatcctgtggtttaggagatttttctcccaaaccagcctcatttcttgaagaagaattcattttcccatattaaattaactcaagctgagcttctgattgcagataaatgtttctaaggcctcaagtcaacttctagggcttgaaggtgggggaatatatgtattttattgagttgcttaatacaaaattctcaaaagcacttgtgggcactcattcctgccttcacaggccctcagggtctgggaccccacgttgggaatcaatggtttagacatccagcatcctattttactgaaggggcaagcccagagatgggagatggccagcccaaggtcacacagcaagttggtggcagggtgagaccagaacccggttcttttgagggtcccaccagaatatccccagccctgatcctcccctccatgcccctggaactctaggaatcactagccatgcctgaggggctaatctccctctgtcagcacaattccgagtgattcttcccctccctgtcgtctcttcctccctaacgggccctcacccctgtcctcttctgtttccttttcctggtcccacctcctggtatttactacatctgtgccatccctcatccccctgacccccattcaccctccgagcttcccccaggagggggagggggagggggccccgagctggggcctctttactgagactcttttgtacaccacaaactttttgtatatttttaattttgctgcgacatgagatattaaaagtcatttcagtacgtg

SEQ ID NO: 159 - DNA, 7733 bp, Homo sapiens
cggcggggccgtgtctggtctgcaaggcgcgcgggctcgtggggggttggctggggagcccacgctgcctggcgactcgggccaccgaatgtgagaccgagtccctttatgtcaccagcgcacacgctgatttgaaccctgcttcgacgtgtgtgtcatggcttaaaaatagctgctaatctgtcaacctgtcttgggcagaaacagcggcggcgacagcagcaggagcgtcatggccgtggcgctgtctgcgccggcgatccgcctttcggactgaggcccagcgcagcgcttgcaaagaggtagaggggctgcggcgggccttcgccttttcagctggctctccacgctggggagaggcgcccagctaggggcgacgggggagggaggggaccgggaagcgggcacccgagcccagcgagccagcctctctctcccgggcgccctccctccgcgcgcggggcccggctgccaggctggcgaggactggggcgacagccatggacctgttacaaaggcgaccgcaggcggagggagggagcggcgggccagggcccctggagccgacggatgggattggagaatgcccagggctgtatccctggacagaaaggggcttctgcatcccccgggaaaaacagccccacggagatccttcttagacctgggctccttcacgcttcccccatcccattcatcatctcgtagacagcagactctctaagaggaaaggttgtattgcaatacagtaatggggtctttaggcctgggtgcaaaggtagaagaagatgatggtgatagtgatggtggtgatggtggtagtgatgatggtgatggtggtggtgatgatggctgtagtgctatatttctgtgctccttccggacccagccattgaaaactctctctccctaaactccctaacatccaatcttccctcaccaatcctggtcctaaaacccctgcttctaatgccttgtaagtgcttggtttctcttggcactggagcaagggagagctgggccctgtctaggggtgtgagatggggacagagcatgggcagggacaaagatggcctctcactgctggtcatagagttgaagtccccctggcaggaggccaggaagggagtggaaggggattctgcaggctccaggacctcctgctttcaaacaggcaggaccacaggtgtgagaggatggggagggagggggaaggggccttgccattgttgcctccctgcctgaaggtcccagggcaagcctcaaacgctggtccttcccagctctgcagctcaacaggtaatctgagacacacctgctaagcccctcgttattgacctcgtgttttgtagggtcacttgactccaacagccatacggttggtaattctaagcctctgagcccctggacctggcaggatccctcatttttccctttccttcctgctttctaggcccccaccacccacccctgtcccccctcccctcaagacacacacagacaaaacactccaaccctgcgtcaattcccccaccatccacctctgtcaccctcccctcaagacacacacagacaaaacactccaaccctgcttagattcagaaattctcacattagagctgagatctgatcagtaatttcctaatgctgatccaaggagggtggtttgcctgttgtgcacatagattggtgccttcttccataagctcatgcattcagcaagtatttattttttgcaaacttactcttcctctttattgctattctccactcaccccatcccacccccaccacacccttcccatagcaggtttatctctgaggcagtggcaggtcacgaaggggttaaagtctaactctggcacagagatggcaggcctgacatgtgtcatggcctcagctgctgttgtctccctgctaattctctttggatgggtctaaaggtacccccaaccccatcccagctccctaggctctctgccgatagccccaggcagatgagactcagattccagctggcaagatccccagcagtggggacaaccacccaagtgccgtgtgtgtgtgtgtgtgtgtgtgtgtgtatgcgtgctggcagtgggggtggggtgatgaagctgaaacctagcagctgggcagctccctctccccgtaaacaaggacatgtgactctcccacctcgtttcgtggcagagccaaagagctgagcaaaaggagctgctgcagcttgaagaaaaagccacccctgaaggctcctgccagagccaggcttaccttctctccctcgagaatcttctcccgaaggaccagcccagggaagggaagcagctgctctggactcactcaagtgtgtctcacaccccttcctcttccagcagcagctacctggcaactgaacccatcatcaccacagccactcctgcagctgccacggtttctgccacctctaagatgtgccctggtaactggctttgggcttctatgacttttatggcccgcttctcccggagtagctcaaggtctcctgttcgaactcgagggaccctggaggagatgccaaccgttcaacatcctttcctcaatgtcttcgagttggagcggctcctctacacaggcaagacagcctgtaaccatgccgacgaggtctggccaggcctctatctcggagaccagtatgtatcgggcagactgggcccacggtagagcgtgtgtgtgtttgtgtgtgtaagaaaggagaagggtggcagacaggtatgcagtggtgtcattggttcctggttgaagattgaggggatagggcacatgggccaagagtagaggctgcaggtttgggagagtttggccaggattattgaaatgcccaactctggccagtcacagtgtctcttgcctgtgatcccagcagtttgaaaggctgaggcaggagtatctagagtacaggagttctagaccagcctgagcaacaaaaccagaccccatctctacttattattttaaaataaaataaataaaataaaaatacccaagtctggacagaaagactctgttccagtaataatatcattcatgtatcacatatttattattacatgccagtgctacataccaggcacaatagatgacttctctgaccttccatctattgtgcaatgtctctgggaaaaggcagccactggaagccaggagcagtaggtaggaagctgcagtggtttctcttgagaccaagcaaagcggcagtgcctacagagattctgcaatttgaaggctatggagagaaaaacatcaaaggaagagccatccccacttctctccctcaaagttatacaaggatttcttttgcttctttggtttgttttggttttggtttctttcttttatttttttttggagacagtatcactctgtcacccaggctggagtgcagtggcgcgatcttggttctctgcaacctccacctcccgggttcaagcgattctcctgcctcagcctccagagtagctgggactacaggcacacaccgccttgcccggctaattatttttttgtattttagtagagacggggtttcaccgtgttgcccaggctggtcttgagctcctgagctcaggcagtccacctgtctcggcctctcaaagtgctaggattataggtgtgagccaccgtgcccagcattgttgttgtttttgagacagggtctcactgttgcccaggctggagtgcagtagcccaatctcagctcacagcaaactccgcctcccgggttcaagcaattctcctgcctctgcctcccaagtagctgggcttacagacgcccatcaccacacacagctgatttttgtatttttagtagagacggcgtctagccatgttggccaggctgattttgaactcctggcctcaagtgatccacctgcttcagcctcccaaagtgctgggattacaagcatgagccaccgtgcctggcctacaaggatttttttcacacacattatctctcttaatcttcacaacagccctgtgagataggtatcactctccctgggttacagatgaggagactgaagctcagagaagttgtgcctggccaaggtcacacgggttgtaagtagcagagcccgggcttggaggctcaagttcagtgctctttctgcttaaggagtttgcactggacagggcaactcagtttgccctgagatatgactgtggtgcccaggggtgtctgccaccaagctgaggggtctgggccggatgaacacctgaaggtgacgtcataaaacagggtaaatgtggccgggcatggtggctcacatctgtaatcccagcactttgggatacttaggcggatggatcacgaggtcaggagttcaagaccagcctggccaagatagtgaaaccccgtctctactaaaaatacaaatattagcctggcatggtggtgggcacctgtaatcccagctactcgggaggctgaggcagagaattgcttgaacccgggaggcagaggtggcagtgagccgagatcgcgccactgcactctagcactccagcctaggtgacagagcaagacaccatctcaaaaaaaaaaacaaacaacaacaacaacaacaaaaaaaaacacagtcacagtaaatgtgagccatggaatatctggcaaaaacacaagacggttctgggtgtcaacaagagtagagacataggggagttaggtgtggaagtggatgtcagaaccatactatctcagagtgagcaggaccgatgaaatgagcagaacaatctgcctgacattcatttcccctctgcagcatccatggctacatggccatctcctctttctgcctgaataccccagggacaggaaaaccactctctctcgaggttctccaccctttcctcagctagactccaccattagaatgtacttccttgtatgaaattgaaatcagctggccaggcacagtggctcacgcctataatcccagcactttgggaggcctagataggtggatcacaaggtcaggagttcgagaccagcttggccaacacgatgaaatcccatctctactaaaaatacaaaaattagccgggcatggtggcaggcacctgtaatcccagctactcaggaggctgaggcaggagattcgtttgaacctgggaggcagaggtggcagtgagcactctggcctaggaaacagagcgagactccatctcaaaaaaaaatcaacaataggattcaggaagttaacagggtgtagacaagggagtcttccccaacaacctggctttcccacccttcctctaacctctactcaatgcagggacatggctaacaaccgccgggagcttcgccgcctgggcatcacgcacgtcctcaatgcctcacacagccggtggcgaggcacgcccgaggcctatgaggggctgggcatccgctacctgggtgttgaggcccacgactcgccagcctttgacatgagcatccacttccagacggctgccgacttcatccaccgggcgctgagccagccaggaggtaggaggggaatgctgggagcaggaaagaacagggtgcctggaatttggggaagtccaagggtctgagagtggagtgagattttagtgacatgacaaaatgctcaggatcttgttaagaaagaaaaaaatattatctcaaccatttttttaaagcaatacagaaaaagacaagaaggaaattatcaaaaatgttaagagtggcaagttacacctgggtggcaagattatatgtgatcgactttttcttttttgtttttttgagatggagtctttctctgtcacccaggctggagtgcagtgacgtgatctcagctcactgtaacctccgcctcccaggttcaagcgattctcctgcctcagcctcccaagtagctgagattacaggtgtccgccaccacatccagctaatttttgtatttttaatagagacatggtttcaccatgttggccaggctggtcctgaactcctgacctcaggtgatccacccgcctcggcctcccaaagtgctggaattacaggcatgagccactgcacccagccagcaggaggatttcttaagcccaggaattagaggttgtagtgagctatgattgtgccactgcactcagcctgagaggcagagcaagaccctgtctccatatacatatatatatattcaatggttgagaataacaagctagaatggtggagagattgaggaaggggccagtaatgacagtgttttcaatggactcattcacgctactctatgcaaagctggctcttacatcagtggtgagtctccacctttgacccctttcaggtttatggacactgagccactgcatgtccccttcctctcattctgtccaggcctctccccttttgccagagatctgcattcctaacatccactcatctgcacccattcctgtcttcatgcacctgtacttacctgtcttcctcttccctgtccatgtcaccctttttttttttttttttttttttttttgagatggggtttcacttttgttgcctgggtggagtgcaatgacacgatcttggctcactgcagcctcagcctcctgagtagctgagattacaggcatgggccaccacgcccagttgatttttgtatttttagtagagatggggtttcaccatgttggccaggctggtctcgaactcctgacctcaggcaatcttcccccttcggcctccaaaagtgctggaattaccgccgtgagccaccatgcccggccccatgtcaccctttccccagcctcctccaagctgccacaagcagtctcaaagctctctctgtgtctctcctctcagggaagatcctggtgcattgtgctgtgggcgtgagccgatccgccaccctggtactggcctacctcatgctgtaccaccaccttaccctcgtggaggccatcaagaaagtcaaagaccaccgaggcatcatccccaaccggggcttcctgaggcagctcctggccctggaccgcaggctgcggcagggtctggaagcatgaggggagggggagagaggtcaggccaggcccgtgggtaggtccctggctcccagctggagataggaggcccaggtggcaggtagcaggaggcccagatcacccatcctcccctggggtcaggagaggccgagccccaggccactgtcactctttgtgggaggggacggggagtgaggttgggcagtgtggtggatgggcacccaggaagggttgaccagggaaggaggcagctaggctgtagatggaagatggtcctgggattcgaacaccgctgggatctggccagggtgctccctgggattcacagtcccttcccctctttgtgcccaagtgtttccctctctccctcaccaaaacaaaagggccatctctgccctgcacttgtgcagaaagtcagggatacggcaagcatgaatgcaatggtgtagagttgtgtgaaacccctagcatagagacagacagcgaagagatggtgtgaaaagcttgcagaaccagacagagaaccccacagactttccactccaagcacaggaggaggtagctagcgtgtgagggttggcactaggcccacggctgctgcttgggccaaaaacatacagaggtgcatggctggcagtcttgaaattgtcactcgcttactggatccaagcgtctcgaggataaataaagatcatgaaaaagaa

SEQ ID NO: 160 - DNA, 477 bp, Homo sapiens
ggagagggccgaggcccgggggcaggagtgcagggctctgaggcggggagaggagaggagagaagagccgcggggggcccagcccggagccaggatgcccgcgccgcgcgcccgggagcagccccgcgtgcccggggagcgccagccgctgctgcctcgcggtgcgcggggccctcgacggtggcggcgggcggcgggcgcggccgtgctgctggtggagatgctggagcgcgccgccttcttcggcgtcaccgccaacctcgtgctgtacctcaacagcaccaacttcaactggaccggcgagcaggcgacgcgcgccgcgctggtattcctgggcgcctcctacctgctggcgcccgtgggcggctggctggccgacgtgtacctgggccgctaccgcgcggtcgcgctcagcctgctgctctacctggccgcctcgggcctgctgcccgccaccgccttccccgacggccgcag

SEQ ID NO: 161 - DNA, 26555 bp, Homo sapiens
ctcggcctggccgccagctccgtccggagcaacctcacctccttcggtgccgaccaggtgagtggcaggaggcctgccccggcatactccggcgggtgtggagggaaggagggctggcccccagcgtgacctgggacaaaccaggtcccctgcctgcactagtttcctgatttgaaagaagaggggggctagcccttgcaaaaccgatggcaaccgcagtgggaataaccatggttgtttttttgtttgttttattttttgagacggagtttcactctgtcgcccaggctgcagtgcaatggcgcgatctcagcgcactgcaacctcagcctcccgggttcaagcgattatccctccttagcctccagagtagctgggattacaggggcctgccaccacgcccaactaatttttgtaattttttttttttttaagtagaggtggggtttcaccatgttggtcttgaactcctgacctcaggtgatccacctgcctaggcctcccaaagtgctgggattacaggcatgagccaccacgccaggcaggttggtcttttttgagctacttgcaggccctatgctaagcactttcactgtttaactgatttaatactcttcaccacccaggaagtaggaattattatgcccattttacagagaaagacactgagaggtttcatggcattaatcaacttgcccaaggtgacatggagggtcgaggagccgagtaaaggcagctggactccaggtcccaccatgaacctcctctctgtgtgttatggggatgtgcgggcagggcaggagcaagccagcttcttcctaccagcagtgctagaggctgtcaggccgacttgctcagatcccagctctgcctttcactagctggagccacatgggcaagaactcatttatatcctgaatgggctgcctggtcttctcccttagctcaacctctgagcctttctccgttcccccttgaacagagcatggcacgtagaagaaatttaataagtatttgctaaatgaatgagtaaatgcccaacaacacggctatattttgatagctgttcccagtgggatattagacaataatttagactaaaatgtaatattattaaaataaccacatatggtgtaaatgagcaaaagcaggaggcaggactgcatacagataggactgcagccatgtggaaagacgaggtgtcaacgaaaggaaactggaaaaagattgtcacagtggtatgatcaggccactggactaattgcactttcttcttgtctcagtttatcaaatgttctttgattgcacatattatactcataaaggggacatttttcaaaaggatcgtttcatccaattggcacccacaattcagcacctagcagtttccagtgtccttgacaaggagtcacttgtccagcttgtttaggatcctttgatgatgacttcatgcccccaggccagccctggccatctcttttcttttcttttcttttctttctttctttctttctttctttctttctttctttctttctttctttctttctttctttctttctttccttctttctttctttcttcctttctttctctttctctctctctctttctttctctttctttctttctttccttctttctttctttcttcctttctttctctttctctctctctctttctttctctttctttccttctttcctttctttcttcctttcttttgacggagtctcgctctgttgcctacgctggagtgcagaggtgcgatctcagatcactgcaacctccacctcccgggctcaagcaattctccctgcctcagcctcccaagtagctgggattataggtgcccgctaccacgctggctagtttttgtatttttttaggagagatgtggtttcgccatgttggccaggctggtcttgactcctgacctcaggtgatccacctgcctcagcctcccaaagtgctgggattacaggcgtgagccactgcgaccggccagccctgaccgtttcttacttcttgttgacattctttctgacctagagacccccaatatttgtcaatgggaatctctcatcttcctttaatcctattatttcattgacatcccactagcacccccaacccagtacccttaacctgtgtcattgaccctattgacctccagagagcctcacccatctagtaccccctgtggcaaaactgatcttctggaggccaggccactgagcagagcctcccgtggcatcaacagggccagaagctcctgtacgttctccccttggctgggcacgaactttgggtggagcaaaggcaggccacaaggcctcatgaagtcgggacctgatccctaggacagtgcagaaacaccaaaatgatttgaggcaggaatggacatcactggatttgagctcttcaaaaatggctccggctgcagtgtagacagcatatgggttaacaagagtgggtacttcacaacaggcaggaagcggctgcagaattcaggggggcagtcagatggggatgtgggggtgggtgggactggcaccatctggcaacagctataccccaggagctgcgtgtttcacatacttgctgatttcagaaagggccatccatcactctcgacaaagcatctgctcattctaaaagaactcatttatatcctgaatgggctgcctggtcttcccccttagagttacaatagtcacattcatttacttccaattaataaatggaagtggctgcttctaatgggacctattcaattttctgcttgaaagtctagagcgagaattatcagtgagctgatatgcccctccctccccacttccaggaggaccccgcagaatctccaatggaatgcgggtttaagtgcatctgtgtggactataattttacatttgaaaaaggaaaaataaatacttgtcttttccccaatgcaactacagaaagtaaagtttgacaaaatcgccctagctagtggaaatataaatctctacttgaaaggcagtaatggatcctgagatttgcaggggcatggaaagggtgactggtttagcaatgtagagaagtatttattctctccattgaaatggcccctagtcctcactgctttttttttaaatgcagatgcccaggtcctgccccagacctgctgagtcagaatctgggacctgggcctgggagatttggaagcagctagtgcagctgactggagccaacagaccagaaggggcctggggcctggctgttgctgattgatccaaattctgggtaaagattttcagcccatctgcccttgctgggaggcctgaaaaaaaacgtttttttcaccaggccagaactcactcttggggctgtgcctgggaccacctctgctgtatatcagagggacaaaagtggggtgaaaggatgggtcacagtaggcttctctgcttgcctctccgaactgcagaggaaattctcgctcagacttctgttctttcggtaacatgcatacaacatttttaataatgtgcaataaaactgagatcttattggcttttttctgattataaaagtaatgaataggccgggcgcgatggctcacgcctgtaatcccagaactttgggaggccgaggcgagcggatcacgaggtcaggagatcgagaccatcctggctaacaaggtgaaaccccgtctctactaaaaatacaaaaaattagccaggtgtggtggcaggtgcctgtagtcccagctactcaggaggctgaggcaggagaatggcatgaacccggaaggtggagcttgcagtgagccgagattgtgccactgcactccagcctgggcaacagagcaagactgtctcaaaaaaaaaaaataatgaatagtgtaggttgctcagtgaaaaacaaagggataaatcaaccagaaatgaacaagtggcatctgagacatctgttgtatgtgttcctctgcgacaataaaaaagcagtgtgtgtcatgggtatgcaaaagcagctgggccaaatgtcctgatctttagcaagtgactcccaagagaaggattcattcattcactcagcaaatatttactgagcatctgtttgtgatcagagactgggaaagtgtcggaacgcccaccacccactgacccaagaagtgtctctgtaggagggaggggtatgggtacagagagtgccccggacccctttggccctcactgtcaccccttcctgaatggcaggtgatggatctcggccgcgacgccacccgccgcttcttcaactggttttactggagcatcaacctgggtgctgtgctgtcgctgctggtggtggcgtttattcagcagaacatcagcttcctgctgggctacagcatccctgtgggctgtgtgggcctggcatttttcatcttcctctttgccacccccgtcttcatcaccaagcccccgatgggcagccaagtgtcctctatgcttaagctcgctctccaaaactgctgcccccagctgtggcaacgacactcggccaggtaaggaggggctctgggtgcagggagcctccaagcctggagaagcgctggatcgctcccggggaggcatggtccaggttgcagacattctggttcagctacagtgatagctttttatgatgatctgctctccagtgggccagagctgcccgctgtgactgaggatggaggtcaaggtagtggtggtagtggtggtggtattattggttgccatctacgtacagaatgtgtgaggatggggctgggggcggtggctatccctctaattccagcactttgggaggctgaagctggtggcttgcttgagcctgggagttcgagaccagcctgggcaacatggtgaaacctcatctctacaaaaaaatacaaaaattagtggggtgtggtggcctgtgcctgtggtctcagctacttgggaggctgacatagaaggatcaatcgagtccaggaggttgaggctggagtgagccatgatggtgccactgcactccagcctgggtgacagaacaggaaaaaaataaaaaaagaaaaatgaaaaaaaaggaagtgtgaggatgatcagggtcttgacagtgaagatggtagtaaggataaggatgatggtgttggtatctacactgaagacacaaacattggcaatgcggaagacagtggcattaaaggagaggatgatggggatgatgtttccaatgaaggctgttaggatacaatgtaaataattccacattaccctgttactaaccatcacagcgtcttaggaaatcggccaaactcgctccctcctcattagctgacatccaaaggaggaaggttctgaatgaccttgcataggtcccatggcttccttttgcccctcgccttcctaaattaactgtctacttatgccaagcaaatctgtctccagaccttgcagccagttacagctcttgtcaataggatctaaatgaaaaaggtgaagaacatgctttccccagtctggcatattgctagaggtttgtaagttgtcaggagccgagaagtgtggtggttttcattatctatcgctgcctaacaaaccacaccagagcttagtgatttaaatgacctttttatctcctctcccagttctgagtgactgggctcagtcgggccgttctgcttctcgtgatggcactggggttgcagtcatttgggacctggaaagggctagaacttctgagtctgctcacttacatggctggcagtcaatgtgggctgttggctgtgagctcagatgggactgtgtggaccagagcaccttggttcccattcgtgtggtcttaccatgtggcttgaacttctcacagcgtcgtatgagggttccaagaggagggagctttccaagaatgaatgttccggggaggaagaaagcagaagttatgggtcttcttaaggtccttaagaggcgttgaagtcccagaccaccacttctgcttcattctaacaggtcaaagctgtcacaaggccagcagggaaacaatggcagtgaaagtaaactccacctgttggtggcaaaatggcagcacacgctgggaagggtggagttgacagtggctgtctttggagatgactacactaatattgtcccttttggaatctcaaaggacagtgcaaggctcttggacaaaaagaggtcagaaagctctcaggacaaagggcaaagggcaaagggtaaaggctgcagcagtgattgatcaatcttgtcgcctactgatattccctctacccccacctctccactctctatgccttgtcatggagggagagggttgccatgttgactgttgaggaggatggacttgagacagcaaggggggggaattttggtgtatcaaatctgtgacagcgtctctctctgagtcaggcttggactgggactcccctggttcccgtggcaaattgatgctacgagccaaaaaatcccttcagactgttttccacagtctctggtcttacttccctcaggactcagaggggccacagctctagagcggaatgagtcttggctaggcacttttgcagcaaaagagaggatagaataatattggcagtagtggtgccaacattgaaaaagagtgatggtgatgtgaatggaaactccgtggagaggacgattttgctgacagcagtcaccttactaaaggtgatgatagtaaggatgctggccttggcgatggtggtgatgatggcgaaggtggtgctaacagcggggtggaggagatgagggtactgatttcagagacgtgctgatactgggaggaggattaaattagggggtgatggtagaagtgaaaacgttggctgaggtggtggggaagattatggctgctgcgtttgtttgtttgcttgttttttgagagggagtctggctctgttgcccaggctggagtgcagtggcacagtcttggctcactgcaacatccgtctcccaggttcaagcaattctcctgtctcagcctcccaaataactgggactacaggtgcacgccaaaacagcctggctaatttttgtatttttagtagggacggagtttcatcatcttggccaggctggtcttgaactcctgacctcaggtgatccacccgcctcagcctcccaaagtgctgggattacaggcataagccaccaagcccagccttgactgttgttttatctgctgcctctggggtctcacagagaccgtcaatgtgcccgcgtgctggccgacgagaggtctccccagccaggggcttccccgcaagaggacatcgccaacttccaggtgctggtgaagatcttgcccgtcatggtgaccctggtgccctactggatggtctacttccaggtgagcatacctgccctttttctctgggggcctggctccccactcaccatctgaatggcctcatttctcatcacagaggcccagggcatgtggaaagggggaaagtctgggaataaagtgaggtgctgccccgtaccagctagcatggggcctggcacaaagccgtctcagcaatccgactccctcggtggtacggcaagaggaactctggagacagcttcctcctgctatacctcctgcgggagttgaattactgggatggctttgtgccaggctaggtccttgaataagtcacctcatctctctgggcctgtttcctcatgtgtacaatgggtggcttaaacgagaggcttttccagctctgctgcattcagattgtccgacttggtagctgaggcctagagagggtgtgtcagttgcccaaggccccacggcaggcaggtcaggggcaagctcacaaaagtgagtactttgcaacagtggttccccagcctggctgtgcttcagaatcaccggcagagcttttaaaaatatgctgttttaaaaacagattccaagtccaaccacaggctattgaatcagaattgctggggaagtttctagtttaagaaacttttcagatgatacagatactcagagttgagaactattgtcttccactcaccatattactcctcagtggggaggttagtgatgtgtttgtgtgtgtgtgtgtgtgtgtgtgtgtgtgtgtgataggagggtgggcagcagcttaatgctagcccccaggccataaggtcattgccttccatacccccttcacaggaacatttgttggagctcccagcctgctacttaggggcacacagtatttctatgatgagatggcggcatgtggtgggagggtgtccatggctgattctcagtcataccaatcagatactgacttccttccataccagttggtaaatggctgctgccctgagcagtccacatgctctcccctgccccagcccttcctgtgggagtctcctggatcctactccattatatagcaactaaaggggcagtgcgtggtattggaggtggcccctgggccctgctcctgcagctgtgtccagagccattctggcaagtccatgtctatgcagtgcttgtgtcaacctgtggactcagcttggcttcagtgtcagatgagaactccctgtgggggcagccattatctttcccatttcagcaaacatttatccatgcttaccctgtgctgggccctggggacacaaatactagtcagaccagctgtgcctgggctctgggataaggctgcacgcactgcctacaggcctgagagcagagcacaggaagctccctgcccagcccagctacctaggagaaaggagggtgggaaggtgactatctccctgagactgggagaggggacagctgcccagctgtcctgtggtacggcgctgaggaatgccacctaggagttgggagggggcatggccgtttctgttccagcctcacccctgtctctcttggcagatgcagtccacctatgtcctgcagggtcttcacctccacatcccaaacattttcccagccaacccggccaacatctctgtggccctgagagcccagggcagcagctacacggtgagagataaagcatgtgttcggcacccagttcagccaggtagcggcttcctctgagaagaggaggaaatgaaactgccttcacactcccctttcctgcctgcaaggcaacctcaggatacaggaaaagcacctggagggtgggaggacttgtgtcacagcgcagggatcctgccaagatgctcaactgcttgaaggaattcaggccagctgcacacccccatgctgctgctctgaagcaggtctcgctgcctaatttgcaccctcagatcaagcatacttaggtcccttttcaactcttccttgtcccctctttctctgggacccttagatacctagatctctgcctttcccagaactttctaaaccagttccttggcatttcagactcatgaaatgaatgatctgcagagctggcagatatatgagaaatttgccattgtagtccatttccttgcccatggcagacatcactagtcaatcatgactttttttatgctgagcccataaatgttccataatcagccactaccaattgataaaagttagaatacaagaggaacctatttgccatctctacataatcccactccctggttacacagctgaggagcatgaactccagagagggaaaggagctggaccccagggtcacccagggccagtctagagtccaggtctcctgactgcagccaggctccttgcactctgctagcctgcctctcctgacttcctcctgcccagatcccggaagcctggctcctcctggccaatgttgtggtggtgctgattctggtccctctgaaggaccgcttgatcgaccctttactgctgcggtgcaagctgcttccctctgctctgcagaagatggcgctggggatgttctttggttttacctccgtcattgtggcaggtgtgcagaggggtgtggggcagggggctgaactttgggcttggggaagtctgcttccaccatgggctgatgctgaagtggtagcctggaccaagttcagcctctcccagtgggcgtcagtgttggcttcccagaggtgcaagctgaaagagaccctcctatctaatccagctgcccctcattttgacagaagaagaaactcaggccgagagaggaacaaatattttcccccagtgaattatcagctccttgaaggcagagatagtttttctttttttattcactgctatgaacatgcacgtgggccctccataaatgtgttgaatgaattttccacttagtggcaaatgaagacttaaaaaaaaattatcttccttcttccatttcaaaaggatctgaagccatttgttacaaagtgggggttggtgggggcagtgggggggatcagctaaagaagtctttcacactgttgcacaaacctgaaccctttttacttagtaactttatgaccctgaagttccttagagtctctgagctatgtctttaaaatggggacaggtgtcattcggaccctgagcagggctctgcccttgtggaactcagtctgatggggggtgttgtgaggattacagcagatgaagtctgtaaagcactcagtagtgtgcctggatcacaagtatgtgctggagaaatgaaagctccataaacggtattgtgttgaaagtgtgaaaacccaactagattttattccagctatatccttaaagcagtttgtcctattttatcctcacaataatcctgggaatgttattcctgcttcttgagtaagggaactgagtctagagaggttaagtgatttgcccaaggtcacacagctagccaggctgggaacccaggtcccccaactccatgtccaatgttcattccactagagcacagctatctcccaagcaacacaggagaaggagataacatagttaaacttgaaagccaggttagaaacactacagcaatacttgacgttgcagtagagaagtcatgtgatatcatggaaagtaggccagctttgaaaccagacataccagagctcaaatccagccctgactacttatcagctgtgtgactgtgggctagttgcttaactttctagttaagcacttgaaagtgctagttatttcactttcttccgcagcaaggatgcatggtaaatgcctagcacataacaggttctccattaatgagagttgttagtgttattgagtgcaaaactcagcttggagcttctagcagccaagaccaaaagggaggagttggtcacatcttggccccctcctccaccccccagtccagcattcttttccttgcctgctgctcaatctttggctgcttcatgagtaccccatccccaccatgtacaagctcttctgtgggctaagctgcctggggtgggcctgactataatccccctctgctcctccaccaggagtcctggagatggagcgcttacactacatccaccacaacgagaccgtgtcccagcagattggggaggtcctgtacaacgcggcaccactgtccatctggtggcagatccctcagtacctgctcattgggatcagtgagatctttgccagcatcccaggtaccctggatcccctcccctgctcctgcaccagtgatgggctctgcccggtggcacctcaaagtcaggtaccccagggatgcagcccccagggcccatctgcatggaggaaggcagtgttttctgaccagggctcattcacccaacgggggtctataattagcacctggttcaagtcagcccctatgtgacaggcactggggatttggaggcgagcaagaaacttcccacaccagctctccacgtattcccctggtgccaggttctccaccctctgtgtctttgaagttgctgttccctctaccttagactgaaggtgaactccaatatccccttcaattctgagcctaaataccaaggtccttgggcagaaggggtcctcccttcccgccccgtgttcatctctctatcatagcacacagtactctgggtcatagtaatggatttctatgtccttcgctccccaccctcccaacccccttccccgggctgggagctagagctgcaaggctggggcaggcccttcagtcagcaaaaaagcaagggcttcctcagctgcgggcccagggctaggctgggtcagacataaagaaaagactgaccctgggagctcactcagatggggagagagtcaggcaaacagtgagccagtggagtgctgtggaagtcagggcagagtgcagtgggagcccttaagcatggagaggaggcgggcaggtgagtgggtaggaggagcggtcttacaggcagagggaacagcataagcaaagacccaagcctttgggaagcgtgggggatagggctggagaggcatgggaggtgcagggagccgaagtgtcgaagggctttgtgcgctgagcctgcaccttgggatttctcctgaaggcaacagcgcccctcctctccagggggttttggccgggaaaggaccccatccgaggtcctttagactgatgctcctggctgtgtgaggaggacaggagtcaggggagtttaagaggcatttgcagaaagtgaccagggctggggttggacccagggcagagggaatagagagaaggacatatatttagaatagatttcagaggctgtatcaaaacaatttgacgatgacgttgaaggtgggcagagagggtggggagagagaggaggtaaagatggtgctgtcactgaaatgatagacctggcaggaaggggaggaggggagacagagctattggggcagcgcatggagtaccccggtgcaggggttcagccaggaggcaggtgagcagggcagaggggaaggcggcattgatgcatgggtgctgtcattgccactgagtggacaggcatccaggggaagcctggagggtggcttggtgggggcagggtcaggggcagcaagcaggggcctgggcctgttctctgcgcctgcaccagcccctgagatcgtctctgctccccctctgcaggcctggagtttgcctactcagaggccccgcgctccatgcagggcgccatcatgggcatcttcttctgcctgtcgggggtgggctcactgttgggctccagcctagtggcactgctgtccttgcccgggggctggctgcactgccccaaggactttggtgagtatggggcctccccaggagtgggacatggatggagggaggcttggaaaggaggtggcaactgctaaagtgctttgactctggggagaagcaagtagagggctagacttgggagaatggggttctagcccgggcttggccagtcacccacagcgtggcctccctccttgggcctttctttccccaagtgttgaacttagtggacctccaaggctcctttctgcttctggaactctgccatctctggctgaagggttacctttctcatggtgtttatatttcacgcccccttctgaatagctgaagaggaattgtagacacccctggagatcttcaggaagtcaaacattagtgggtatctgtccagtgtcttcagatcccaccactgcccacatggcctcagttgccagccccagggctaggacacggcaggcacagggcgcaagacagaggatccctgtcctgacccaaatctaacccctcctttccccagggaacatcaacaattgccggatggacctctacttcttcctgctggctggcattcaggccgtcacggctctcctatttgtctggatcgctggacgctatgagagggcgtcccagggcccagcctcccacagccgtttcagcagggacaggggctgaacaggccctattccagcccccttgcttcactctaccggacagacggcagcagtcccagctctggtttccttctcggtttattctgttagaatgaaatggttcccataaataaggggcatgagcccttcctcacgaccatggtccatgacaaggggcagggcagagggggcctggatgggagtccttgtgggggaccaggcaggggacttggatcaacaagcaccagacgagtggcgggggcaggcgagaggctcagtgggacctccaccctcgttgccccagctggtggctgaccaggtggctgtggagggtcaggagctgccccggatcctctccatgtagttgcgaagctcctcagggtccttcagccccatgtcctcacacacccagcggatgtcctcctcgcctgccacaaggatggactgcacagcaggggcccctacaggctcctcaggtgactgggctggaggggctggcgcaaatgtcacaaactctactcgcttccgccgccccccagcctcctttcgggccagggtgcttgaggagctggtggtgcccccaggagggccaggggccagggtaggggcctcccctcctcccccactctcacaggggcagctcccctcccccttgggcgggccaggggactgccggtccagctggcggctcagttcctcctggtcagtgcccagccagacccagttgtggggctggggggaggtggggtcagtggcactgtcgggaggttctttgcgctgatagcgcaggacgaagaccacaccattgaccaagaagatgaagatggccacgcagaagactcccagcagggcgtacatgcccagctctagctcagtgacatgctgaggggcagggaccatctcctcctcctcttcctcctcctcctccctggcttcggtctcctccttcctggcctcctcctctgcccgctcaaacttgcccctcacacctgtgttgcccccgacactgcctgccacctgccgtttaccacccatggtggcttctgtggctggtgggctccaagcagggctggatgggagagcaggggctggagtggaggcagggggcagccccagccaggcggtgccagaggccagaggcacacggtggcggccccggcggcagggctcgggcgggtgcagagccacatgcagcggcagcccctcggcgcctgccccactcaccaccaccccgagctgggcaccctgctcctcagctggcaggatggcaccaggctcctcggctgagacggacagtcccaggtcacggcggtcgtagagctcagctggggccacagtgtgatcagagaaggacagccatagggagagggccacctcctgtggggcacacagacacaggcagagacatgcgagggcacgcacgcatgcacagagaaaccactcccacagagataggccacatggaggagagaccagagagaaaacagagacacaggcagatagacaaaacacagggagagaggggacgcgtgtcaatcacctgtctgccactcagccctagggtctgagttattgggagggtcctcagttagagccatctaaccaacctcccactgccatactccagccactgcttgatcacctccagctgcagagagctcactacctcacagagtcagtcctcactctgaaaaccctaaggggtcgaggtaccagggtcccttcctcccattcccctctaccatgagcccccatctggagatgttgacctcatccccctgaccccccaactgtcacctgctttggggcgggaagggctgactgtgcccagcacgtagctgtgacctccccggggtgggcagtgccccggctcaaggtcagcgagatgcccatcactggctgcaccctcagctccagcactgagaccttgtcgtccgtcacagccagcgcctgctcccccaggatggagtcagacagtggggaacgcacctgagggtggaaaggagctggaggtggggggccttccatacagacagcccccacccagagggaaccgggtgctcccagcaccctcacgggctgccctccggaggtgggggaggtcttcgccacggacagcccccacccagagggaaccgggtactcccagcaggctcatgggctactatccctctactctttgcaccccggtgcatacctggaccccaatcccacacctagggggcagttcccttttccctcaagacccggtccccacactacccacacctcagcccttcatagctagagggcttccccccttatgcggccaccccattctgagcctatccccaatcccactgcactcagacctagaccgcacaactcccccacacactctgggctcctggcacactcttcactcccacccacgaacattttgggggcccctccacccttctcagggggtctactctcctggtccccagctgcttacctcaatggaggtgacaccgggctcccggcccaccacgacacggccaccctccagagaggctacacgcgagtccagcacgcgggcgtgtggcgccacgaggtgggacacgtctagcagccagtcggggccaagcaggtgcgtgaggcggcggccgccgtccagcgggtgggccgcgaagggggcgaggaagcgcacaccggcccgctggtactgcaggtggcagccacgggcgcgccgctcggcctcatccgacgcctctgcagcgggttccgcaggcctgcagggcggggaggccgggactggccgtcagcgctgagcggccccagcctgcccagggcccagctgctggagacccgcagctcgtccccggcggctcctaatcaccagcagctcctgtttctcaaacgcagacatccgcccctcttggggtcaggcccttccacctgcaggcgagccgccccagcccactcccgactggcgctgtgcctcgatcaccgctcttgctcccaagtggaccgcaggggagacgctctcttacggggaccctgggggcgctcactctctgaagggcctggaagctagattccagaggcgtgggccacctctccctgggttttggggagccccctccgagggtgttcatttcctgagctctgtgtcatcttaggctctgagggtacgaccagcatagacagaccgcagcttcaaggggctgacattctcgggggaggagcgtggaaaggatggacaggcaacattaaccagtactgacgtagattaggaagtggagggtgctacgggagaagtgaggcagggaaggaggagagggatgcggaagtcagcaatttcacagaaagcgatcattggctgggcggcccagggtggaggtgggcagaaggaactgcaagcaacagggcagtttttctgaccccgacttgggcccatggctgtgtcccctgcgccctctccgtcccagtgtgactcgccaaggcctgccagcttcctcaggcctccactcacccttcagcagggccaggtaccctccagccgcggacctgctcgagggtggtgtcggtgagctcgatacgcagcggtagcaggggggcccacacggtcagccgcagcgaggcgcggagccggcgccaccagaagtccactcgcaccccccgggcgccccggctctccttgccagccacgaacacggcatcacaggcctcagacacctatggaagggcagagggcaggtgggcgggctaagccactaaagacaggtgtgaggctgggccgggtgggtggctcatgcctgtagtcccagcactctgagaggccgaggtgggtggatcgcttgagtccaggagtttgagaccagcctgggcaacatggcaaaactccctctctacaaaaaatacaataaatcagccgggtgtggtggcacatgcctgtagtcctagctactggggaggctgaggtgggaggatcccttgagcctgggtagctgagactgcagtgagccggactgtaccattgcactccagcctggggacagagtgagactctgtttcaaaataaatagattaaaaaaaaaaaaaaggcatgggccagaagagagcagccctgacctcaggccgtaggacgggctcccactgagttcagctctgtgtgtcactggaatgcatgttgcagcaggattgttggttaagcccctgttctttgtttaagattttactgtaggggccattccttgaggttccctggggctcagtcaggggaactggccattgcataccagtcttcctcctggcagagcaggggtgtgaacccaaaactttggctccttattcatgctggcctttgacattgctcttggagccacctggcaaccagctacagccaggtaggcagaggtgggacaaagcagatctcccaccaaggccctccagcaggaaccacacacatttgagcaaaggaccacaagtggggaaaggcaccttcccccttcaggtggctgggatttgcatacatgcagactccatgcttcccctcttagaacttcaagatagaggaagttgctctaccaccctcccttttatttcacttcacaatcaccggtaataataataataataatttttaccattgtataattattacatcatattataacagcaataactgccattgtttcagcccctgctatctgctaaatactgtcttaaagtgcttttaattcttacaacaacccgaagatatgttctcattttaaagtttaggtaacgaggctcagagaggttaagagaccagcccatgatcacaaagctggttgacaacaaagatgtgtttcaaactaaaactttctgatcccagagtatgtgctctcgactctctcaggccagcgcacttgccagtgcaataatgagcgtgaaagtgtctaaggtcggggggctgttagggttacttgactcgggagagaggtggctggaacaaaagaagttgaagctgtggttcctcccatgaggtttctcgtctcaagaagaagctgttctcttggggacccacatgaggaaggaggaaaggtgtgtgtgcgtaactgtgcccacacaaatgcagactcacatgagctgggcacctgccactcacctgcaggacctgtgtgttggcagactcgcagccgacatgctctgtcacctccaccaaggcccccccgccgtccacagtgacaaggcgcacggggacatgctggggcactccagtcagtggtgctgtattcaccagctcctcagcctgggggtggaggaggggctcagccccaggcccctcagctcatggggctcctgggacttggcctccagccttcccaggcagagatggaggtctccttaccttggccagtgggataagggctctgatgtcccgctcagacaccaggatttcccacaccattttgtccttctctgcttcaggggcctggcctgggtactccagctgccacgtgacggggcgagtgaccgctacgcccccaccagtgctattctccaccacaaagtccacccataggaactcagacagttcaaggggactgctggccaaaggagacagagaagccaaatgcttgctagctgccaggcatggcctcagcacttcctgcattcatgattatccccattttacacaggaggaaactgaggcacagaggttacatagctcacttaagaccacacagcaaaaagtagcggggctgggatctaaacccaagcatcctcgctctagaccccaaactctgacccactcttggcctctctaagatccatgaagccatttaaccacctcccacctggcaaggtggctcactcccctgcctgcccgggcccgcttcccccagacttccgctttccacagccactgaggtggcatgcgggagattcacttccaggtcccaggaccagacacttgaccctctgaatgataagcttcctttgatcaaacaaaaacctatgtgctgggaaccgtcctgggtgcctgatatgtagcactgtattttattttcaaaaatgctaagggatgcattattattcctatttcacaagtgaagaaactgaggcttgggtaggggaatgttaactggcttgcccaaggttttgcccatcccaaaagcatcagaaccagaattcgaactggggctactgagtccatggccttgacccaggctcagggcatgaataagaagagttcacaaccgcagaactgcagctgggctttttgggggaatgtgaacggcccagagaaaggatcatttggtggaagcagggggatggagtagtggctatgagggctctacctggggcacaggattggttggcatctcttagaataagactcacagacacttgctatgcctggcacatggctggggctgggaagatagtggccgaatgaatgaatgaaggaatggattatgcctgctttgtgctgcttccttgaaaaaatctgtccttgggtctgctcacctggggatctagaggcagcatggcagcctccaaatctgctcaactgcactctataaccagccctccctcctttgccccctgggtggagggaaactgcccacctggaatctggctctgtgagcccagcacggtggcaggtgatgagggtggtgtggtgcctggagcccttgaagcggtccagcttggcagtccagagtgtgggctgggctgggcgggcggctgtcacatgcagccccttcttcaccttgatcctggggaagagagtataggctcagtttggcaaggtgcatgctgaactgtgggctggattgaaggggaaagacaaggagccaaagccatctgacctccctggctccagtctgaatctcctcttcaccatcctccaacccagaaggaccccgcctcagtgcagctcacaccttacagctctcccccacccaaagaccacttacgcctccccactgcccataaggtcaaagcttagccgggcatttgggggccctccagggtctggtccagccttaacttcggttgtgacatctctccatgcactctctgcttcagctacacacaagtttcccacacacacggcacccattcgtgactccaagcctttgcccagtctgtgccttcagcctgctctgccctttcttactttacctgctgatgctttaagcctccaacaactcacagaccatttcctttagaaagcttttccagtggtgggatgaatttcccccttactgcacccactcacctgagctcccaccgcactttgaacctccctcagtgcttacacacccacatgccttctaatccaattcatgcccatccagctcccttccctaccactgggggcccctttctgccagatagggactggcccttgctcgtgtttggatctgcagagtgaagacacagggcttggcaggctgtaagtgtctaggaaagatctgcttaataagagtgagcataggagggcgtaggagatggggagacacagagacgggacatgcacaaacccaggcagggcttgaaactaggtctaggtttcaaagcatgtccacagaccgctcttcgatcctcaggaaagatatcattacaaagtgagcaagtcccagtgcctcaccctaaccaagcccaggactatcctgcctagaactcaggcttctcagaatcttaaagcctaagagatgcctctcccatggattcctgcgctggactccagaagcaagtcatactctgcaagcccttgccgggtgaactgggtaggtgggtgggggctgctttgggggaacttattacggaaaaggacacaaagaatcagggccttcctatggggaagagcaagctctgtccaaaggctagactcctacggcgagggtggcaaggagggacagcatgtaggtgaacgtgattggggcaaatatccctctctggagcactggagcaagagctcacacttaggtactgcagtctctaagccctttgcgggttcccctccctggagacttgcagctgccctgaaggtggaccgttagccccattggacaaaggaatctcagggaggtgccaggggaaggggcagcttcctacttctgactctaattccagggctgtgcccatggtgggctcctaccagcacagtcatggctttttacctggaaggagtttagtttggtggacacatgttttgcagaggtcaaggattccagcaaggaccccaggaggagcaggtacctgtccctagtcttcccacagaggttcccaccctcacccatccccgtggcctggtgctcaccgcagggtcaggaggctggctgtgaagttgtgccgaagcaggagggtagcactaaagagctggccgggccgcactggcatgtcaggcacccgcagagtcacagcctcgtccagaggtacctcctggtactgcggggggtctgctgggcgcagctccacaccccccactgggagggcctgctccccagggtcgttctcctcgccggagccacagcccccagggccctcagctgcaggctcaagcgtgtaggccagctcggcccgtgtggtggaggcctgtgagaaccagtgcgagggaagctccagctccaccacgcaggcgcccagggatggctgtgaagacacgacagcagtaattggcatgggggtgggtgcagggcgaggaacaggattctcagcacccatggcaggaaacccagagctggaggggctcatgaaagggaggcccagcatgggccggagacacagcctgagtgacacagcaaaccagcaacctggctggggcttcaaaccaggtctaggtttcagagcatgtccgcagaccactcttcagcccttgggataggtctcattacaaagtaagccaatcccagggccttaccctaaccaagcccaggactatcctgcctagaatccagtcttcttctcagaatcctaaagctcaagagacgcctctcccatggattcctgtgctagactccaaaatagtggaaatagcaattataaaagtaacactactaataatgcaaacacactggctgattgattactctgccgtaagctatccttacattcatctcacttgttccttactccaactccagatggggtaggaattcttaacaccccattcttcagatgaggaaactgaatctcagagagattaagttacttactcaaagtcacacaccaaggactgaactccctctggggccctaaataaccttttcacagcactgaaagctagtgggggcagaaatggagtcgggtggtccacaacccccgcgcttcccaggagtgggggtttcctctctgccgcgggcccaccacctggctgatgcagctgcagcaggaccagcctaggtggggcctgtctactcacctggaagcggcaggcttggtgagcagtgccggcagggtgtgtggcatggagccgggcacagggcaggctgccagaccctggtggccaatcctgccctttgaggtggaagagaacccgggcgtagggctctgctggagtcacagccgcttccactgaaacggcccgcacgtcccatgggactggccgttggtggggctcagtgactcgaggggggaccacctggagggagaatgagagggcttaacaaaagaggagcttgggaggggaagatctaggaagatgggatcccagcttggcagaagagaacctttatgggcctcagtttccccctctggaatatggggagcacagccggggctggggaaggctcccaatttgtacccagcagacctcaggccctgagtcctgttagcctgagagtccccggtgccccctccttacctgctgagtggcaaaaggtgggtaggaggcccggagaagtggctgggccctgggccagggctgtaggagcagaaaggtctcagatcgggagctcagagaggagttggcaggtgggtagtggcccacctgctgcacacggaagtgttcaggggcgtctaggagctccagggctgccggcaggtagacagggtccaggggagcctggccacagtccactgaagaggcataagagggagagatgatgacagctccagagctggcaggggctgacccgggtgccatgctggggcacagtagttgtgggcaagggagggagaaaagggctgtaaatgtcccttcccctctcaccaccatttcacagatgaggtcactgaggcttaaagagcctcacacaggtagtatgtagcaaagccaggattcgaatctgagtccaggactggatgcttcccagctattccttctactttccacagaccttggccttcttctcgccaacagccttctcaatgtctccttttccccaactcctgccctccatctactcgcctctgataccaaggcacttctggggtgcaaccgtcggcagactgggccagtgtagtaaaatatggtaatgaagtgagctttctctgccctgaatccttggccaggctctgctgggcatccacccctcctcccccatcattgccatggcaacctgcaccatctttccaagcttgctcccttcttccctgaaccgactggtatcgagtgcaagtgtgggatgggcgggcgcggaaggtgctgaagaggtctgtgaaggcacttgcttgccctgggggtggggtggggaccaggagcctggggaagacagtcaaaatagtcaatcatcagaaggacaaaggagcactaagccatattggtttgctctaactatgagcactaataataataattagcattttgtgaatgctatatgcaggtgagaatttaaatactgtatgtatatgaactctttgagtctttgtaataattctgtgaaccaggttctattatgatgaatcccattttgtggatgtagaaaatgaggccgagaggttaaggtatttgcctgtggttccacagctggagagtgaaggagctgggggttgatcccaggtattagccactagaccatccggcgtctccacctgccacttctctctccactctccactgccacggtgcaccctgcaggcttcatgccctggagcgcacctcctctcctctgctctgcccggtggcacctccctcctcattcagggccatgagtgaatactgcctccttctgaaggaagccctccttggttactcaccttcccaccagtctcctgtcttttgcaaccctgggtgcctcctctgaattagtaatcttcctataaacaagggaccctgtcttgctcatcctggaattcccccaaactaggaagcgctccctagagaggatttcctgggagcctggagacctgaatttaaattgatgaaacttgggtcaggcattaacattttgaagcctgtttcctcacttgtaaaaggggcaggagcattaggtggcactgtggacaggacagggctgtgtaaactgtggagtgctgtctggagggagcaggcattattgctgctgcataatggatttgacaaggttttcctcctctctctattaggactcccatggcgtccctcgggatggggagcaggtggctgaaagcaaccccacagctagctccctctcagccccacagctggactgtgggtgggggtgggggaattggtttcaacctccttcctggccctccccaccaaggagcatatgactgacaggctctccctgccccctgccccaagcgtaacaagtgaccactgctctctgggggcagccactggcttcaggttcgcctcctactccattgcctccataattacaagatgctcttagcctgactcccacggactcccatcacccagcgctcggctctctcggtggggagggcagagaatgtttcactgtccctctgtcttctgtggcatcctttgccttgcagccacagcccagctagcccaggccaagggagtccgacccccaccccgaagcacagggaagttgctgccctttcccgcagtgacaggaatcctctcaaaggttctggaaggcaaggatgcggccatccctggagacgccaaggtcagggagccctgggggaagggggagggagggcttgcgtctgttgcaggtcccaggcaaaggggctgctttccactcccgaggggggtgggttggtggcggcggaaggaggctaggagggtgcagcgctacagaccacagtgagggagtggggatgacgctagtgcgcccgggaccggggccgccgggttcgatgcccgggctgaggggtccctcgcagaaggtgcgggacggggaagcccctgcgccgggctgccccgggtcaggaaggagttgccgggtcgtgcaaggtgaaggaagccttaggggcgagtggctgggggcaggttcccgagggcaagaactctccgaccttcagggcgctgcggggcgaccccgctcagggttcagtccgagaacccaaaggttggtggctcccgggcatcactcgctcccactcggccgggcccggccgcccctcgccccggccctcccctcccgctgacctctcacgacgtccagggcgagggccaccaggaggcagagccaggggccgtagggcccccgaggggccgctgttgtgcgaccggccatccgcgcgcacatccttcccacagaaggcggggacgaggcgggcggctcaggtggccccagtcccgcacggcatctcccgcacccgctccgcgccgtccccacctggcccgctgggtcccggccgccgccgccgccgccgccgcccgccccgcggc

SEQ ID NO: 162 - DNA, 2178 bp, Homo sapiens
agacggcggcggcgtggccgcacgcgcggcccggcttctgtcctcgcggcgctccggctcctggccccccacgccatgcagccgtccccgccgcccaccgagctggtgccgtcggagcgcgccgtggtgctgctgtcgtgcgcactctccgcgctcggctcgggcctgctggtggccacgcacgccctgtggcccgacctgcgcagccgggcacggcgcctgctgctcttcctgtcgctggccgacctgctctcggccgcctcctacttctacggagtgctgcagaacttcgcgggcccgtcgtgggactgcgtgctgcagggcgcgctgtccaccttcgccaacaccagctccttcttctggaccgtggccattgcgctctacttgtacctcagcatcgtccgcgccgcgcgcgggcctcgcacagatcgcctgctttgggccttccatgtcgtcaggtgggtggcggtggcgctgcttttccaggagcccccgacacaggccgacccctcccggtcttgccctcccagaggccgcgtctaggttggacaccccctacccacagcaagcagtgcctgctggcgcccccgaggctgtcctgggccagcgggaggaggccagccttgcccgagattcgctccctcccgaaggagccccgctgtgcctgccccagggcacagccccttggggtagtggggacagagttcgcccccagagccgggccctgtttccttggacggggctggggaggacactctgagccccttgtgacctgcttcactgtgtcctggctgtctctgctgcccatggggaaacaggctgggagacgagttaggtaactgtcccgggctggagagccggcaactgccagtcccacgccaccaccccaccccaagccacagtgagcttggtgcactccgccactcccgagctgccgtgtctctgctgtacagtttacaaaggactgtgctttttattctgtctttggtcgtttctagcctcaggccccagccccttgtatttctgttctagatgatcttgactttccagagttcagcaattctgagattgagggcaggggcggagggctggtctgggagtctcggagtcctcctggagtctctctgagagtggggaaaagccaagaccttactttgcgattcaagcgtctttcaagtaagcctcgctgaagagggtcggcccttccctggggaatgtcaggttttgaaaatctcatggcgtcctgtgctgtgctgaactgagggcaggaatcctaggggctgttttccttttctccttctcccagatcagagcatcagatactgccctaattataggtcctttctattaaaaacttaagtgcattccaaggactgcgagcacagtcagcactttggcagagacaggtcacctgggtgtcacacggcaaggctacagggctgtaagagtcgcttgaccttcagttgtgcactgaggccggctggtccttgagaaactaagtgacctgcttctcagctgtacaagtaaaaaatctttgcaacacatcatccaaaccgaggctcagatgctgcagatggaatagggccctgccttgccttgccttcccggcagcatcccatctgaccctgtctgggtcccgtgatggctggctgggtgtgggccccgagtacacgggagatcgtgtgtacttggaaggagtcgaggctgtacctctctttgcaagaacctgttctctttcccttcttgtctttaaaaatattgaatacagtatttttttaatggtaacagaacctggtccagcttctgtggaaaagaaggattgcccagcaaacctgagttgggggtttttctgttcggttctcattacggaccctctaggggggtttctgtgttgttcaggaagggcttctttgataaagaagtaggcccagtgtggtggcttgtacccgtaatcccagcactttgggaggccgaggcaggagcatcgcttgagcccaggagttcaactggccaacacagtgaggctttgtctctactaaaaatttaaaaattagctgggcatggtggcgcatgcctgtagttccagctacttgtgaggctgaggtgggaggatcgcttgagcctgggaggtcgaggctgtagtgagctatgattgcagacagagcaacaccctctctc

SEQ ID NO: 163 - DNA, 521 bp, Homo sapiens
tcagacttcgctagtctaagggaattggttaaacctgcctaacaggttcatctgttaacctagatcttcccagactgtattgccaatgaccttactaaggactctccagtgtatttctttggaatattagtttattgtttgcaggatctattgatgtgagaaatatcaccttcaggcatagactacatgattatccactttttaaccatttcatactactggaattcagtcctcttcaaagctttcagttttagaaagtattttaaaatacgacaacacagaaggttgacatccttattctaatgtgcgtttaggaattgaattgttttaaacccacaaatatcctgaaaaatggacaaaggacatactcaagcaaaatagtaacagcagttgaaaaaatatgtcatataccattaatatgcaaagcaatacaagttataacagtaaggtaccatttcctcatttaatttgaaggaaaaaaatagtaaggcagagttgggcacggtggctcatgcctgtaa

SEQ ID NO: 164 - DNA, 22889 bp, Homo sapiens
gtgacaaccatgagtggaaaaaactaattatggttcagcactggcctgagacagtatgcgaggtgagtgtttctgccttgacgggccctggggcctggggagccctgtgaagaggggtttgtgtgcacgtgcccgtccagggcacccacgctgctggtgcgggaggtaggcatcgctctggcgggtgggcggtgtctcctgcagagactgcctccaggagggctgtgtgtgagcttcccagggctgctgtaacaaaagtgccacaagctgggtggctgagagcctcaggaatttattctcacggtcctggaaggggaagtttcaacctaggggtcagaagggttggttcctcctggaaggctctgagagagtttgttctgtttctctgctagcttctagtaaggacccgtggtcctctgcgttcctgggctgacccatcaccccaatctctgccttctccttcacggtgtgttctccactttgtgtctctctgtctcttctgatgaggacaccagtaattggatttagggcccaccctaatctggtatcaccttttcttgatgacatctgcaaagaccctgtgtccatgtagggtcatgttcacagatgggaggaggggttaggacagggatatatcttctgggaggacacggttcaacccacagcaagcctcagtttgtctcctccctctgtgggcggcaagccacccaggtgccaaggcaagagaccgagggcataagctgttccagtataataaagaaaatatataaaatgagaacagttatactagaaatagattatagatatgatgatatatgaatattattaatcatcagtttgtagcattgctctttattccaatattataataatccttgctctacaattacagcctaggaaaaaccaggccatacagagataggagctgaaggggcacggtgagaagtgaccagaagacaagtgtgagcctctgtcacgcccggacagggccactagagggctctttggtctagtggtaacaccagtgcctgggaaggcaaccattacttagctgacctcggtctagtggtagcgtcagtgcctagggaaggcacccgttactcagcagactgggaaagggagttagagcagactctgcttcaccatacctcttgtggataggcctcatatcagtcaggcctgcccacagccatctggaggcctaaccatctccccgtgatgctgtgcttcagcagtcacactgctgtttcactttcatgttccacccagtacacctggctctgccttctagatagcagtagcagaattagtgaaagtactaaaagtctttgaaatgcatagaagaaataatggcgtaagctggcctctctctctctccgcctccgctgccatacagggaagggccctctgtccagtggacacgtgactcacgtgaccttatcagtcattggagatgactcacactccttaccctgccccttttgccttgtatccaataaacaacagtgcagccaggcattcggggccactactggtctccgcgtcttggtggtagtggtcccctgggcccagctgtcttttcttctgtctctttgtcttgtgtctttatttctacaatctctcgtctccacacgaggagaaaaacccacagtccctgtagggctggtccctacatccctccatgtattggacattttattaacatgtcctgtgagtgaagaggacccaagagcttccctgcctcctttgctgtgcttggcacccatggcactcacggccctccgggctggcccctcatcatctggctgcgttttgctccatgcccacatcccttcagtgcgtcagtgtccaggcccttctcattggagcacccagagccaggacactgcctggatctgcacctcagggcgtaccctgctcggtgtgtcaagctgaccctggtgtgcattgcacacttctcaagtgtttgaccgtgttgctgagctagcaccacattctgtcaggagcacgcaggctttatgttttgcctctagcactgagtggtagtgactttcgcttctacttcctcactgatttttctgatgacaaacgaaaatgaaattttgcttatctggctcaaattatgctcttgctcacttctgtacacgagattgccccgttttcagttttgcagacttaatgttgcgctcctgctgctgtttccttgccttgggttggggcagtggacagaaggagccggaagctgcctggcatcaactttcaattgttgggagtgtagctggcattctgagatagggagggattgctggagtccttggttcctacggaagaaggaccgtggaggaggagctggaacttaagcactgtctttgacccacactgaaggatctgcctccagggcctgagaccaggctgctctgcattcagggaggcatttacatgacaaaacgtgggtgtgtccctgcacactgaatgtaaatatgggtggaggcacatctttgccttgaggctttagaaacaagatttaaaaaaaaatctgtagcaaaatgtccttgttaaggagtgtatttcctactgggcagccatggtgaagggttctgtttgagcccaggtgtcctcctaggcagtgagggctgtccctggtgccccctctgatgagatgcttgtgtcaaagatgctcagtctgcctgtcgggttctcagtgttctgggctctcccacagctccatgcaggcaggcctgggaactgagtgctgtgcagagccctcagagccccgtgtggtgcaggctttgctctctgcattgcctccaggaaaggagcccagcttctggctttgaactgggttccctgagggatagagttgagtggcagaggtgaagttacaggttttggcctctgaccctctttctccagcactgagcagtaaggactttctgttctacttcctcaactgatttttctgttgacaaatgaaaatgcagtttcacttatctggctcagattatgcccttgatcatttctttctttttttttttttttttttttttttgagatggagtcttgctctatcacccaggctggagtgcagtggcgcgatctcggctcactgcaagctctgcctcccgggttcaagctattctcctgcctcagcctcctgaggagctggaactgtaggagcccaccaccacacctggctaatttttgtatttttagtagagacagggtttcacaggttggccaggatggtctcgatctcctgacctcatgatctgcccacctccgcctcccaaagtgctgagattacaggcgtgagccactgtgcccagccttttttttttttttttttttttggagacacggtttttttcttgtcacctaggctggagtgcaatggcatgatctcggctcactgagttcaagcaattctcctgcctcagcctcctgagtagtagtgactattagcgcctgccaccacgcccagctaattttgtatttttagtagagatggggtttcaccaggttggccaggctggtctggaactcctgacctcaggtgatctacccgccttggcctcccaaagtgctgggattacaggcattagtcactgcgcctggcccataaaaacacctgtttctgttaagtcaaatatttgaggaatggcttaacaaaaatggctgtttctgttaagtcagttgtttgacgtttggcttagaacatccagccctagtgtagcttcctcatggatgtgttgttgtaagcaatgtattgtgaagtagccctggctttagcttgtgttattagtgcagtacctgtatctcgttggcatatgttgcaactagctgctaaatgtattttaatagggttcctaagtgtatttgaataaacaaagagccaatcattttcttgttatattttctccctagaaaattcaaaacgactgtagagaccctccggattactggacaatacatggactatggcaagtgtctcacacaattaaatcttaggcagaagaggcttgctgactgggaaccctagcttgaatgtggtcttaatatttattcttgttttttatttttaggagtttatccaatagactagattcttatttaaaaatatctttagtctttctagcagaaccctgattctcttgttctttaattctgtcttcatagaacaataacacttttttttttttttttctgagacagagtcttactctgttgcctaggctgaagtgcagtggcacgatcttggctcactgcaacctccacctcccaggttcaagtgattctcctgctccagcctcccaagtagctggaattgcaggcacgccccaccacacccggctattttttgtatttttagtagagacaggatttcaccatgtttgtcaggctggtctcgacctcctgacctcaggtgatccatccaccttggcctcccaaagtgctgggattacaggtgtgagccactgtgcccagccaataacactttttaaaatagtgtttacagattctcggtacatgtcagggtcactacattttaattttctcattttgttcttctcttggggtttattataaataactacatgaaaatacataaatgcacgtctcgtacacatttcagagacactcaaatttattattctggttttgtctgcgttttgttcagttaattcttttctatgtaacatggacatacttgtgacgctgaactgtgcacattaatcgccccatctgaaggacccgttttgtcccactgcctcgatgccgggattgaaaagggcccttttagcttaattggtgcctcctggctccttaggaagagggattggtggaaaacaagttaaactgggatgtaggtacttggcttcgggtttcactttcttctctgtctggtcagataaccttgacctcctgtctctggggctcctggctttgctagactttgcgtggtgtcctctcccctgctgtgaccaagtgctctgaatgtacctctgcccatcatggccgtttcatttctgaggctggaatgaagctttgcaatgctgtccagtccagcggatagaatcaggcaggtttcacatgctggtccagctgttgaccctgaagacactctcctccctggcctctttggggctctgaggggtcggggtcttaggaagttagtgaccttgtggagtaagcagcactcaagagtcagagttgataagtccagaattagatgtgtgaggatggagttaaagttctagacagtgtaagtgcgtttgctactgaaaatgaaatgaaaatcctactagctgatcttctgccatacgccaggcactttctgacatgttttatctgtcatctcctggagtcctcctcaccattgaaaggaacagactctcgctgttctcatgctggatctgtggtgcggagattggccgggggtcagcttacttaggtctcggtgctagggagcagcagaggttgccgtcaacccagccggggctgaccccagagtccccgctcctcggtgctactaggctatccattgcacttcctttactaagcagtggcctgtctgcattactcctggacggtttaacacaatttcttttcccttctaaagaaatttgaactctgactcctcttacctgcatcttctttcttaagcatcctgcctgggataaggaattcccaattagaatttctctttttattctttgcagacttcaatgaaagtgttttctaaggtcatgtagaagccaccccaaccaagcctaatatttcttattttctcttttaaatttgaatttccaggcccgataaaagtgaaggatgtaatagatcgtggcccttcaatttagaagagattaaggtattgacttttaattatatttctactgcagagtgttgacctagattaactcttttcttcacaagcgtaccttcaaagtcatctttaaaattaaggggtcatgaatgtattcaccaggattgagcccttgctgctgttttagtaagtattgttatctcgaccccacaaattacaccaattgaccttttccctctcctcccctcccctgccctgtgcccaagccactgcatgaggggcctgagcgaggggctccgaccggagcaagccctgacactcccccatgccagacctgtgcagatcctgacgctcgcccgccagccccgcctcgtcccaggccccaggacttctgggtcagatgaccgacgtgggaatctggtcggtgtgccatatcgccaggcatctccagacagctgaggctcagagagcacaggcctggggccgtcctatctggtggatgggtttctgagcaggtggacatgctgggcctttccagtacaagagcttgattaaagaaaactcacagggcgggaatttattagagatactagcagaggcgttcctttgagatacccgtaccttatatgtcatacggagtcttcactcacacacacaccctcatctttccttaggggtgccaacagttcctgtgtgtaaccagtatataccagggtaactggacctggaccccagggagggggtggtaactgaggccttctttaaaacgtgtggtagcattgaaggcttgcgggagttgtgggtctttcctaggaatggtacattccccaaggtcattagttgcaaatccatcacaagttctttttttcttttcttttctttttttttttttttttgagacagagttttgctcttgttgcccaggctggagtgcagtggcgcaatcttggctcactgcaacctccacctcccgggttcaagcaattctcctgcctcagcctcctgagtagctgggattacaggcatgcgccaccatgcccggcttattttgtatttttagtagacatggggtttccccatgttggtcagactggtctcgaactcctgacctcaggtgatccacctgcctcggcctcccaaagtgctgggattacaggtgggagccaccgcgcccagcccacaagttctaatccatatggaattgttttctttttcctccccgtgaagaccttcagtgggatgagccaagaggctggggactgccgtgagacttagaagggacaccccagagcctggtgctgtctctagctcctcacacagactctcctcctctcctccgggactcactgcagggaatggtttctggggaggcgtgatgaagaggccacttcaggatacattgagtttgaagtgcccttgagacctccagggggtgacatagaggatcttcagggtcagaggaaaggtggctttaggcatagttagcatgaggatggtgaatcaaaatgacaggtgtggggatggacatgggtctgtggacatggatgggtgaggagtcagggccgacaggtgtggacgtgggtggatgagggggcagggctgacaggtgtggacgtggatgggtgagggcagggctgacaggtgtggacgtgggtgggtgagggcagggctgacagatgtggacgtgggtgggtgagggcagggctgacaggtgtggacgtgggtgggtgagggcagggctgacaggtgtggacgtgggtgggtgagggcagggctgacaggtgtggacgtgggtgggtgagggggcagggctgacggatgtgggtgggctaaggggacagcgctgacaggtgtgggcctggtgggcagaggggacagtgctggtggagccccgtgttaacagccaggtggaaaggggcatgtgtgcctgcagctgggaaaggcggaaacccaggagtggagagatttgagaagaggcaccgtaggactgcatatccccggggggtccaggacaggaaagctgaaatgctttttgagtgggggcgtgggtgggtcgtgggtctgtggtggtgtgagccgctgctcctcagagtagtcctggcttccttgttgtgtagcagtaggaacacctttgcattgtcccaaacggaagtagcccaatttgcacactcaatcatatcgtgccctaggacatctcggagagctgatggggctgaagccagcatggtggggcaggagaggtggggtggggggctggaggggaagaggagggggacagagctgcgcccacacaggcaggggctgtggggtaggggctgagttacaaatgggctgagaaaaggaccctcatatagggtgctggaaaacaggagaaagggaaggaaagtgaagttatccgaagtttgttaagcacctttttactgacctttttggggtttttttggtgtagagggtgtgtagaaatagaaaagtaaactccagttctgttggatttagcgcgactggtgcccaggctgcccagctcacacaagctcttctctgggaaaaggagagcttgtcctttgtttgtttgtttgttttaactgatggttttgttttgtttttttttaagatggagtctcactctgtcgccaggctggagtgcagtggcgcaatctcggctcactgcaacctccgactccctggttcaagcgattctcctgcctcagcctcccgagtagctgggattacaggcatgtggcaccgtgcccagctaatttttgtatttttagtagagacagggtttcaccaggttggccaggatggtctcgatctcctgacctcgtgatccgcccgcatcggcctccgaaagtgctgggattacaggcgtgagccaccgtgcccggccaatgtttttagaacagttataggtttacagaaaaattggatggagattacagacagttcactcccttccccctcaactctcccaatcattaacatcttctatagtgtgttacatttgttacaattaatgaactgatactgatactttattattaaataaagtttagcattaacattagggtttactcctgtgttgtgcggctttggacaaatgcaggagagcaagtcccacccagtgtgctctggagcagccgctggccctaaaccccctgagccatacctccccttcttcctccccttgaacccccaagcaaccgcgaatctcattcctgtctcttaagactaccttttccaaattgtcacgtcgttggaatcatacagtatgtagcctctgcagactggcttcttgcacttagcaatgtatgtttgcagttcctccagtgtcttttcatgactcgacggctcattggtttttgttgctgaaaatattccattgtttggatgtacactttatcccttcacctataacagcttgtattttcgtgtgcagttttatgattactcaaattgcacttgtagatatatcttaacaaacacttcatacaaaataagcataggattattttattcaccaaagtattgttaattagcagagctcaattctttggtgtcagtttatcaaatttaccttctaggttttgagtttattattaagaacctgcgtagacttattttattttttaatgcataggatcttttgccagaaatgagggcatactggcctgacgtaattcactcgtttcccaatcgcagccgcttctggtaagtcccagcctctgattgctgtcttgattactgtctgagcgggtgtggggagcgtgatgaatcgctagaagtggaaactgtgtgggaagcaagataacagaatctgtcttctggggctgagcagtttgaacaaccttttatgagatatgattctgttacggcatttttggtgcctttctccaatgtataaaaaattgaaagcaagtggaatttaccatataagcctgttttctaacctgtatggtatttattactttgctttaaaacttttctcggccagtcacaatggctcgtgcctgtaatcctagcactttgggaggctgaggcgggtggattgcttgagctgaggagtttgagaccagcctggtaacatgacaaaatgccacctctaccaaaaatttaaaaggtcagctagatgtggtattgtgcggctgtggtcccgggagatcaaggttgcaatgagctgtgatcagctggggtgataactagcctaggtgacagggtgagaccctgtctcaaaaacaaaataaagatacaaattttctcttctgaggcttaacaaagtccaatgcttgcatatctaagaattagtccatatcagacaggagagaatatttcttaaggaaattgtgctcctgtcttcaaatacattaagaaaaaagagaccaggcacagtggttcacacctgtaatcccagcactttggaaggccaaggcaggtggatcacttgaggtcaggagttcgagaccagcctggccaacatggcaaaaccccatctctactaaaaatacaaaaattagctgggcatgatggcgtacgcttgtaatcccagctacttgggaggctgaggcaggagaatcaattgaattcaggggatggaggttgcagtgagccgagattgcaccactgtactccagcccgggcaacagggcaagattccatctcaaaaaaaaaaaagaagatgtcttctaaaatgatgatctcatgcctatgacttagggaggagagaaagtgagacttagcatgtgaggctgagacctcagtcatagtgaagcacctttaagttcagcagaagctaagcctagggcataaacgccatgttgaattcaagatagcttttaaaatcctggcttttttaagaacataaagttaaattccttgtattaacattatattaactgaaggtaattattttctctatcccacttcaatattgcaatttataattcagattacaacccatcaaattttaggtgggaagattaacctagaaatatttttgtgtataattttcaggaaaattaaaagttaagtttagaagaaagcttttgaaaacaaaatgaaatggaagtgatgtccccctttctggttcatcggtgtggcagtgaagtggccttaggattcatggaccctcagtctgtgcgttgaatcacccttgaaaattcgggtggtgaatggttcaggtctcagtcacctgttctgcacagcctgtgttctagaaaattatttcaaaataatggccatgataagttggaatggaagaagataggaaaaaaaattatatgtcacttcacagtgtacttcagatgatgagtttatggtaactgagttatgtgaaagagaatttttccagttgttacaatgttccatgatagagtctgtcagattttagctaaatggcttaaaataaatcagcaaacatgcaaaggccttcagtgagctgggtcttgagcatttaatcaaaacagtgtgggcacagtatgcatttatttttgggctctgataaaggcaagatgacttactttaaattttcaggttgatagttgaattacacacttaaaaaactggttctaaatgaaaaagataaatctcacacacaaattaatatttatatttttgagtgctcctaaatacaaaatatcagctagggaggagctcctgtctgggctgtgtcacccagtcctgtgcctatcactcaagtcacctgactaactccatgggggttggcctctggcttctccacctctgctccttgggcaggggaaggtgtcacagcactgctgtggaatgtgtctttgggcataaccagccccgaggactggctgcctgttgtggccgagcgggctgggtgacagtgggtgggtgagcctgggacatccgctcctggctgcatctgctcttggtgggtgagtcagggtgtctctcagcacagagggcaacacgctgagtcacttcgcattggtgactgaccgttctgatgcttaaaaaaaaaaggtccagtccaaatgaagtgtgagtgaatgctgtgagctccatgaatatcaatctatttccaacatctgttgagttaagcttgctccaggaataatgatggctgacatttactgtttattgtgagccaggaactgttttcattcatgtggaagggctcagcacacctcatctcacctgcagaattacccctgttttatagaaactaagtcacctggaattcaggttacatttcaattagtttaaaataatctcctttttctaccttataggatataggaagttatcaggtaatttgctctggaaaggcttctagatgaagacagttactcatccactttcatcgttcctgttttcaacttttcatcattttctgagagttaaatcaataggaattatttaaaactagtattttggatgaattttgccagtgaattaatgcacatttagattgtgtttttaagactgcatataagtgctttataagtggttgcatgaatgttatttattaaaacttcatgaattcatcaccaataaagctgaggaaatctgattcccattttgtcttttcatgctaaagatgataaacatctgatgacacgccagtcattctgaaggtggctgtcaatctcgtcagcagttgattggatgacagcccagtgcagtgggaagggcgctgaccttggacttgagcgtggccttcaagggcaggctctgagtgaccttcagcaagtcccctggcccttctgggcttccattccctgtctgtaaactagcagtgatatttccgccttgcagagttttgagaaccaaacgaagaacgtgaaagatttttgtaaacctttaatctgcagtaaaatatcaggaatcattctcagtgaccacatttttctggaatacaaattgctgttcacgtgcagccctttagttataggctattcagttgttcttattgtcctctatgtagaatggatgcttaaactataatttgtagaagctgaaatggaaaatgggcctgaggtgtttcctggtaattagctgtcctgcctttccatggctggttgcttagaaatgacagtttgtgccactctgcgaaattccctgactgcaaagcacccactcactgcaggagaccacacgttgctttgtgaatcagtgggggttggggcagcagcatgttcttttttctcagctttgatttgttgttaattgagcaagctgtaattgtagacgtgaactgaaactgattatttaatcgtgggggattgaaataattgcctatgttgcaaataaggaattttatccttcctactttgtaaaagaaatgacatgcctaccacatgggaatagtctgtgctgagagaaaacatgcttgagcattttaattgggaatcagtttcattactttttttttgagatggagtttgtctcttgcccaggctatagtgcaatggcatgatcttggctcactgcaacctctgcctcccgggttcaagcgattctcctcctcagcctcctgagtagctgggatctcaggcacctgccaccacactcggctaatttttttgtatttttagtagagacagtttcaccatgttggtcaggctggtctcaaactcctgatctcaggtgatccacccccttcagcctcccaaagtgttgggattacaggcatgagccactgcacgcagcctgtttcactacttttaagtggagatttttcctaatcctcacaggaagcatgagtgggaaaagcatgggacctgcgccgcccaggtggatgcgctcaactcccagaagaagtactttggcagaagcctggaactctacagggagctggacctcaacaggtgggtgcgcccttcccccggctgcacttcccagtggggatctctgctgtcgcccaagcctgacagctggatccaggggagtgggtgtagacctcactgccctccagcagcttctgcatgtgcactattcggctactgggatcattcctgaggaatgttctgagcctaccaagcctttccagatcattctacatcacgatcacacagagtgggtgcagagtattgggatgcccatctgggcaccatctcatcatcagagtcggccatagggaaaacgaggactccaaccagcatgtgccgttctcagccatgattcctgataaaggatagtgcattaataagtcgtttccttagaaagacggaaactctggaagtctgtaggtctttgccgcagaactcctggaacaagcaggcaggaaagagatgtgggccagggttctttaagccccagaaatgaccccaacctgcctaaatcgtccctgcctgccctcacctctattcttgagaagtggaatacgttgtcccacttgagccagttgacttgtaaagcaaagtgccttctgagcgccacaccgagcccactcactgtccgaatctggttgctagagagccagggtgtgcccttacctctccgtcgggacgtttcagggtgtcagcgtcttagctgctctcactgaccttcatcataagaggtcataataaaccagtgaagtcgtgaaaaacatgacaggcaattgcacagcctctgtgttgctgcttttggaattcacgcagcttgttttagagcaattctccttcaaatcagaataataccaggagccttagctaatcagctgtatttaaggtttctgaatcaaaactgcttaaaagatgaataaacctccattgcttatctagacatgtgctttgcctcctcaacgtacaaaatcgtctcacacagatggtctcctgtgtcatctgatgaaacgcagtctaacagctgcaacttgggtgggatagagctcaggcactgatagaagaggggcttggcacggttagcggggatcaagattacatcaaagaatgccctgtgaataaacttctttaaaaatcacctcccagagcgcgtggcattaggtgtgccttttcatcctggttctgacactaactagttgtacaatttgtgtatctaacctctagctcttttttccatgctgtgaaataaatggataggttgccctcaaccctgaagtctcttccagctcttaaaatctgcactaccaggtatatacactaagaaacgtacacagacctatacactttgatttgtatatagtttgtgtatataatttgatctatgtaatttaatcttaggtttttaataaaggaagcattgctttcttgcagtaagagcaatattttaggaaacattttctcacctaacaaatgtagctaattagctgttcagaaatcattatgggccatgtgtggtggctcatgcatgtaatcccagcactttgggaggctgaggtgggtgcatcaccagaggtcaggagttcaagaccagcttggccaacatggtgaaatcccatctctactaaaaatacaaaaattagccaggtgtggtggtgcatgcctgtaattccagctactcgggaggctgaagcaggagaatggcttgaacccaggaggtggaggttgcagtgagctgagatcgtgccattgcactccagcctgtgcgaaaagagcaaaactgtctcaaaaaaaaaagtcattatgaggattaaccaagagagtgtcttaggtagctcctggagcacaggagacttgcagttaaaaagaaagtctgacattgctgaaagactggcagggtaggacccactttggagatgacaagaaagatgccctctgtttcaaaacaggggtctcacagtcctgaccctgctgcagagtgctggtgttttccaggctgactccataaaccagttcatttaatcaaacagagaaaggataaatggatactactgaaaattttaaaatcaatcatctaaataattcatctctgtatccaacaaatagtttattaagtggctcctacttacactcgttgaaactcagtagctttcctgctatggtttggatgtggttggtttatccccaccaaatctcatgttgaaatttgatcaccagtgtggaggtgggaggtgtttgagctgcggggaaggatccctcatgagtaggttaatgcccccttgcaggggtgagcgagttcccactcagttccccagagagctggttgttaacaggagcctggcaccgcccccaacccctggcttcctctctggccatgtgatctctgtacacaccagctcccctttgccttctgccatgagcggaagtttcctgaggcccttgccagaagcagaatctggttccatgcttctcggacagcctgcagacccctgagccaaaaaaacctctttttttaaataaattacccagcctcaggtattcctgtatagcgacactagacagactgagacacacacacacacacacacacacgacacatgcaaaactctaagtcctggagttcctgtggggattcagcagagcccagtgctgccctgccattgctgtagatgggaatggtgcgtcctccattcattcattcattcattcattcagtaaatgttcactgagggcctgccagggcaaagcactactgagagtatgtttgctaaaacctataaagaacaattataggaaaattatattcttagtttctccaagggaaatctataattcttagtgccttcattttaatctaaaaattaaattaagaagtcaaaatttaagacccctcatttttccttgtaaactggtatcacaaattatctttttctcataggttggcttttcaaattatcataaactggaacaggctgggcacagtggttcacgcctgtaatcccaacactttgggaggccaaggcgggtggatcatgaggtcaggagttcatgaacagcctggccaacatggtgaaacccccgtctctactaaaaatacaaaaattagctgggcatggtggtgcacgtaatcctagctactcaggaggctgaggcaggagaatctcttgaaaccaggaggcggaggttgcagtgagtcgagatcgcaccactgcagtccagcctgggccacagagcaagactctgtgtcaaaaaaataaaatagaataaaaaattgtagcttgtttttcttcacttcataatatgaaggcagcaaacctgaaaaaccacaaatcatcttgaagcaaagttgtcagggttcccatagacacagatgagctgatggcacgtgctagagtacccacagataaagacctgggatgcgtgccaagctcatctcaactcagcagaaagcatgatgctgggttaggtgctgcatttccccacatctttctctctttgccgtattcccttgatcacccaagtcaggagcatgctacccaatagacgtgtaacacgagccacagatgtcattttaaattttctagtagcatcattaaaaggagcaaaaagaaacaggttaaattaatttcaaaaatattttattaaactcaatatatcaaaaataggatcatcgaaacttaggataaatattaaaaaattaataagctagtttacatttttttttttaactgcaaagtctgaaacctgttattcatacaacaccaacagctagggtaggcgaggtcctgtgggttcgggccatgatggggctgaaaggaccctggtccggcatctcggtccttgttccaggaactctgtggccaagacagtctgacaataagttattgcccacagaggatgtctaagtctttgtgtccactctgtgatcgtgatctagaattttctaccaaggcttgatggggaactaggatattcttctgcaatgattcagaattttacagtgtacctttatactttaataagtgaattctatatatggtagtttggtaggattctgtgtagaagtgctttaggaggtgattgaaagctgtagggacttaccatacggttatgtattgcttggtgatggggtataaaattgtcatgtgaacatcttggagtgcacttacttagctgatacagcccacgacacacatatgctttgtggtatagcctgttgcttcgaggctacaaacctgtacagtgtgtgactctactgagtactgtaggcacctgtatgtaacacaatggtaaggatttgtgtatctaaacatatctcaacatagaaaaggcacagtagaaatgtggtcatatgggaccgccctcgtacatgcaggccttcactgactgaatgtcgtaatgtggcgcatgactgtgtttaaagatttgtccaaatgcagtttaccaggataagcctggaatccgatttcaattgctgtcttttaaagcaggtgtggcaaacgggtggtgatgtgtgtgccagctccactcggtggtggccccagcgctcccatgctccgaaggagtcaggaactggaaagggtacctgcctggagcagtttgtgtgtgtgctaaggggtggggaaggcggggactgggaaccatgtatttgcagtccatgttgacacatttgttgcataaagtcatagaaaacactttcctttaagagtgtcttaatttttaccatgaaatatgatacctgaaaagaacaagaaagcaaagtggaccttcattatacagctaacttttttaaatttaaattttagtgtgcttctaaaattggggataaaaccatccatcaattactaccaagtaagtcttgcttttgcttcttttctcgtgtgtctctcccggggacctccagtagggccgtttcagcctctgagtcaatgggctgtaaattgccccagtgcaaacccccttcctacttaaatgttatcatgtgaacagattttatttgcattttattttcctgcgcatgttgagtaggagctgaaggctgcttagaccagtgatttggaagcacagatttcatggctccctttgtgagaagtgtgtgctccagggtccggcagagcaggtggaatctgcagtttcaagagtcacattcacttttataacgtagtcttatatttgtttgtggtttgttttcatgataaaattgtgatttgttttatgataaaagaaactatagatatttaagcatgacaagatgttattagctggtaagcatatacaaaaagttgctttttgccaggtgtggtgactcacgcctataaatcccaggaccttgggaggctcaggctggaggattgcttgtggctagaatttcgagaccagcctgggcagcagagtgagacctctagaaagaagtaaaagtagctgagcatgatagtatgtgtctgtggtctcagctattcaggaagctaaggtcagaggattgcctgcgcccaggaatttgaggctgcagtgagccatggtcgccccactgcactccagtctgggcgacagccagatcacgtctctttaaaaaaaaaagaaaaagtagttgttttcaactcttggttgcctgtttttgtaaacaaaattgtactcctttgttacctggggatgcttgtgctcccatggtgtagctgcagtagggaccgatgtgtcatccacaaatcccgggatatttacgacgtggacctttacggaaaatgtttgcagactcttgccttagagaaaggtatcagattctttgagatagttttcgtatttatcacaggttgtggatttagaaaaaggttgaaagtcactgatcttagtagttctggggcgatggctggatgttgaacaattattttggtatcttgactgtttgtgaaataaattggcaacagtgtctttgctctcatggtgtctgcttacctgtgcagccatttttccagagtgtggggagcagtggacttgaggaaggagtctaccagccctttccagactccccctcaaccccaaccccaggaagccgtaagatgatcgcttgcagggccctcaccgtcctcacctggactcatgtgcgaatagatgagggacatgtgcctgccatgtttgcccagagctcggtgttcagggaactgattacaggggtggcaaaagccacaggggccacacatttgctgagctgcttccaggtgcgaacggcgcttgtttgggcatcagaaacagcacggtggatactcggagtcctgtcctttgaaaggagtttgatttatcatcaggagaaatttgttgcttttgcatccagcatccagccacgtatccactcatctgttttatggggaaatcagggctgcgggagcacccaggagagctgccgacccagacatttcctgggaaatgcgttgctgagatggaggcctgcagcctgcccaggccctgaggggagtggttcagtggagcagagctgggggctgggggctgggagatatgggaccagttgcttcttgagggggctcaggggcagagcaggagggttgggaaggggccgggtgggagccatagacatgaggacctcatcctccagcagcgctgagctctgagtaggccggggtgtttgcttgttgctgtccccgtggtactggggagaggctaggcacagagaccctccgagtaggtcacatgctgggggaatctgggcctatggctatgcagctggagaggaagggatagtgtggggagcttggacttggccgtttgggacagggggatgggagaggcagaggtcctgcctcaggcctccataggagtgacatttgctggtgtcagaagcttggcaagaggggaggatgatcagaccctgcatggacagttcgaattggagctctctgcagagtccaggaagagaggtctggatgggagggaagccatggggtggaaaagatagcttccaatggaaggcagtgaaaactcgccataagtgaaggagaagaaggaggccaaggagatggggcaggaatggcagccggcagccaggcggtcagtggagcaggtgctcaggaggcccacaggagagcttcgtggaaggagtggacagtgtctgaggcaaggggcaaaaggcatctgctggagctggtgaccccagcttggtgccccccaaagccagagtacgaggctgagaggatgcaggtgtcctcctaggaggtttgagtcagaaggcacgaggcagaagcagtgggggaggactccctcagtagagcgaggaggaggcccctcatccaagaggaggttggagcacaggggggtctaggtttgcagtttcgggaccggtagctgaggggtcccagggcctttcttctgtgaaggagaatgtgtccaccgtggggagggggtcgggagagagagatacttcagagtggacagggctgagaaagctttatgggccgcgaaaggcagagtagttgttggtggatgagggtggctgtggcaggtggcgtttcaggtgagacagctcggggcccagaaagacactgggaggaggagagctctgctctccagagaaacaggagcagagaggaaaacagagccgcagcgagcggcttgtggtctggggatgaagcccaggttgacagcatcctctgcttcgctggtggaggtgggggcatcattctcacacctgtgctgggtcctgtccctgccagccaagggagaccaggaccctgccactgttgcgctcaggatagtccagaactgtcagatcttttctgttgaagtttaatttctaatacacttgtatttaaaatcaggttgcagattttaaagatgcccttgccagagtatatggagtgatacccaaaatccagtgccttccaccaagccaggttagacagttatgttttgtcttcctttttttctcaagaagacaggttctacttttctgatggccttgtcttcaccatgcagttccctggggcagacttgtatttgtgcatttgtgtctgtatatgtgggcatgtggtgtgtgtgtgcatgtgtgtgtgtacatgcatgtgtgcatgtgctgtgtgtgcatgtgtgtgtacatgcatgtgggcatgtgctatgtgtgcatgtgtgtgtacatgcatgtgggcatgtgctatgtgtgcatgtgtgtgcatgtcctgtgtgtgcatgtgtgtacattatgtgggcatgtgctgtgtgtgcatgtacatgcatgtgtgcatgtgctgtatgcgcatgagtatacatgtgcgcatgtgctgtgtgtgcaagtgtgtacattatgtgggcatgtgctgtgtgtgcatgtacatgcatgtgtgcatgtgctgtgtgtgtgcatgtgtgtgcatgttctctgtgtgaacatgcatgtgggcatgtgtgtgcatgtgtgaatgtgtgcatgcatgtgaacgtgctgtgtgggcatgtgcagtgtgtgtgtgtgtgtacatgcatgtgggtatgtgctgtgtgtgtgcatgggcctgtgcctctgtgtgaatgtgcatatgaacatgttcatgtactgtgtgtatgtgtgcacatatgggcatgttctgcatgtgtgcacaggcctgcacatctgtgtatgtgagcatgcatgtgtgtctgtgtgagcatgtgctgtgtgtgagcaagcatggtttcttgacagcatgctaggacagggtttgtcttcttgcttatctttaacaagaatatacctgttcttttagcaatagggtactgttgcccttttggcctacaaaagccatttcttctcctaatatcttgatagatatgttgagtgctgttgtatctgtgtgtaactttgttaattttctctaacataaaagcagaggcttttcaccagggcaccaggctggcctctggtggtgaccaggggatccaacccccaagcccagctccactgcccacaggcgagtcacctggggccactccttccaatttagtgcacagcagccttctgctcaatgaaggggtccgttcttggaacctagaacctgtggtgtggagcctctgcttttgttatcttctaaaagttctaaaagttcatgatcttaagaccttgatgataatccaagatctgaattctaaagcgtctttcattgtttacttttaggatgaggaagtacagacaattggtcagatagaactgtgcctcactaagcaagaccagcagctgcaaaactgcaccgagccgggggagcagccgtcccccaagcaggaagtctggctggcaaatggggccg

SEQ ID NO: 165 - DNA, 869 bp, Homo sapiens
cctgggcttaagctatcctcttgcctcagcgccttccaagtagctgggactacaggttcatgccaccacacctggctaatttttgtagagacagggtttcaccatgttgcccaggctggtcttgaactcctgagctcaagcaatcctcctgcctctgcctcccaaagtgctgggattataggtgtgagccaccacgcttgaacccttttttccttttatactgagagcttgcataattagttccaatgtacaactaagttttcataccatcttaactgtaaattctatacaaattcaacaggactcaattatttacaaaagctaatgtgtgacaacttgatcttcttacttggaatcttcccttctaaaatttgatttatcctgaagtgtctgcttgacttatatcctgtgttgctgctggctttttccatgtgcattttttgcaagctgctctttttacttcagtctcgttaagtcttgcagttctggctagaggcctactgccatgaataagctgccgctccacagtggcttctttgaagtcttagagtcagatgagtttcacggtgttcaggtttgtgatccagtgtggccccaggttctgggtaacacgtgtgatgcagtgctgtgtgcataccatgtcgtgaataacattcatgatgcagtgcacataccgtgttcaagttaacagtcctggtggcatctgaagtagcaccctaaaatcaaatgacacaaattctgcagagaagcaagtgaagtctaaaaactgagttggggtagtaacgataaatagcgttatgctagttcaggttatgttttgttgccaaatgaattacaaaaaactaccaggtttcaggcttttatgggtt

SEQ ID NO: 166 - DNA, 232 bp, Homo sapiens
cagtggcgcgatctcggctcactgcaagctccgcctcccgggttcacgccattctcctgcctcagcctcctgagtagctgggactacaggcacccgccaccacgcctggctaattttttgtatttttagtagagacggggtttcgccgtgttagccaggatggtctcaatctcctgacctcgtgatccgcccgcctcggcctcctaaagtgttgggattgcaggcatgagcc

SEQ ID NO: 167 - DNA, 158 bp, Homo sapiens
tgggttcacaccattctcctgcctcagcctcccatgtagctgggactacaggcacccgccaccaagcccggctaattttttgtattttttttttttttttttttttagtagagacagggtttcaccgtgttagccaggatggtctcgatctcctgatc

SEQ ID NO: 168 - DNA, 169 bp, Homo sapiens
ggttcatgccattctcctgcgtcagcctcccgagtagctgggactacaggcgcccgccaccacgcccagctaatttgttgtatttttagtagagacagggtttcaccgtgttagccaggatggtctcgatctcctgacctcatgatccacccacctcggcctcccaaag

SEQ ID NO: 169 - DNA, 293 bp, Homo sapiens
tttttttttttgagacgggagtctcgctctgtcgcccaggctggagtgcagtggcgcgatctcggctcactgcaagctccgcctcccgggttcacgccattctcctgcctcagcctcccgagtagctgggactacaggcgcccgctaccatgcccggctaattttttgtatttttagtagagacggggtttcaccgtgttagccaggatggtctcgatctcctgacctcgtgatccgcccgcctcggcctcccaaagtgctgggattacaggcgtgagccaccgcgcccggcc

SEQ ID NO: 170 - DNA, 276 bp, Homo sapiens
ttttttttgagacggagtcttgctctgtcgcccaggctggagtgcagtggcgcaatctcggctcactgcaagctccgcctcccgggttcacgccattctcctgcctcagcctcccgagtagctgggactacaggcatccgccaccacgcccggctaattttttgtatttttagtagagacggggtttcaccgttttagccgggatgatctcgatctcctgacctcatgatccacccgcctcggcctcccaaagtgctgggattacaggcgtgagcc

SEQ ID NO: 171 - DNA, 238 bp, Homo sapiens
tttttttaagacggagtctcgctctgtcgcccaggctggagtgcagtggcgggatctcggctcactgcaagctccgcctcccgggttcacgccattctcctgcctcagcctcccaagtagctgggactacaggcgcccgccactacgcccggctaattttttgtatttttagtagagacagggtttcaccgttttagccgggatggtctcgatctcctgacctcgtgatccgtccgcc

SEQ ID NO: 172 - DNA, 229 bp, Homo sapiens
gacggagttcgctctgtcgcccaggctggagtgcagtggcgggatctcggctcactgcaagctctgcctcctgggttcacgccattctcctgcctcagcctcccaagtagctgggactacaggcacccgccactacgcccagctaattttttgtatttttagtagagacggggtttcaccgtttttagccgggatggtctcgatctcctgacctcgtgatccgcccgcc

SEQ ID NO: 173 - DNA, 249 bp, Homo sapiens
tgctctgtcgcccaggctggagtgcagtggcgcgatctcggctcactgcaagctccacctcccgggttcacgccattctcctgcctcagcctcccgagtagctgggactacaggcgcccgctaccacgcccagctaattttttgtatttttagtagagacggggtttcaccgtgttagccaggatggtctcgatctcctgacctcgtgatccgcccgcctcggcctcccaaagtgctgggattacaggc

SEQ ID NO: 174 - DNA, 283 bp, Homo sapiens
tgagacggagtctcgctctgtcgcccaggctggagtgcagtggcgcgatctcggctcactgcaagctccgcctcccgggttcacgccattctcctgcctcagcctcccgagtagctgggactacaggcgcccgctaccacgcccggctaattttttgtatttttagtagagacggggtttcaccgtgttagccagaatggtctcgatctcctgacctcgtgatccgcccgcctcggcctcccaaagtgctgggattacaggcgtgagccaccgcgcctggcca

SEQ ID NO: 175 - DNA, 247 bp, Homo sapiens
tctttttttttttttttttttttttttttttgagacggagtctcgctctgtcgcccaggctggagtgcagtggcgcgatctcggctcactgcaagctccgcctcctgggttcacgccattctcctgcctcagcctcccgagtagctgggactacaggcgcccgccaccacgcccggctaattttttgtatttttagtagagacggggtttcaccgtgttagccaggatggtctcgatctgatctcct

SEQ ID NO: 176 - DNA, 236 bp, Homo sapiens
tctttttttttttttttttttgagacggagtctcgctctgtcgcccaggctggagtgcagtggcgcgatctcagctcactgcaagctccgcctcccgggttcacgccattctcctgcctcagcctcccaagtagctgggactacaggcgcccgccaccacgcccggctaattttttgtatttttagtagagacggggtttcaccgttttagccgggatggtctcgatttcctgacc

SEQ ID NO: 177 - DNA, 213 bp, Homo sapiens
tttttttttttttttttttttttttttttttgagatggagtcttgctctgttgcccaggctggagtgcagtggcgcgatcttggctcactgcaagctccgcctcctgggttcacgccattctcctgcctcagcctcccgagtagctgggactacaggcacctgccaccatgcccgactaattttttgtatttttagtagagacagggtttcac

SEQ ID NO: 178 - DNA, 208 bp, Homo sapiens
cccaggctggaatgcagtggcgcaatctcggctcactgcaaactccgcctcccgggttcacgccattctcctgcctcagcctcctgagtagctgggactacaggcaccgccaccacgccctgctaattttttgtatttttagtagagacagggtttcaccgtgttagccaggatggtctcgatctcctgacctcgtgatcctcccacc

SEQ ID NO: 179 - DNA, 209 bp, Homo sapiens
atctcggctcactgcaagctccgcctcccgggttcacgccattctcctgcctcagcctcctcagtagctgggactacaggcgcccgccaccacgcctggctaatttttttgtattttttagtagagacggggtttcaccgtgttagccgggatggtctcgatctcctgacctggtgatccgcctgcctcggcctcccaaagtgctgggt

SEQ ID NO: 180 - DNA, 279 bp, Homo sapiens
gacggagtctcgctctgtcgcccaggctggagtgcagtggcgcgatctcggctcactgcaagctccgcctcccgggttcacgccattctcctgcctcagcctctcgagtagctgggactacaggcgcccgccaccacgcccggctaattttttgtatttttagtagagacggggtttcaccgtgttagccaggatggtctcgatctcctgacctcgtgatccgcccgcctcggcctcccaaagtgctgggattacaggcgtgagccaccgcgcccggcc

SEQ ID NO: 181 - DNA, 301 bp, Homo sapiens
tttttttttttttttttttgagacggagtctcgctctgtcgcccaggctggagtgcagtggcgcgatctcggctcactgcaagctccgcctcccgggttcacgccattctcctgcctcagcctcccgagtagctgggactacaggcgcccgctaccacgcccggctaattttttgtatttttagtagagacggggtttcaccgtgttagccaggatggtctcgatctcctgacctcgtgatccgcccgccttggcctcccaaagtgctgggattacaggcgtgagccaccgcgcccggcca

SEQ ID NO: 182 - DNA, 279 bp, Homo sapiens
ttttgagacggagtctcgctctgtcgcccaggctggagtgcagtggcgcgatctcggctcactgcaagctccgcctcccgggtccacgccattctcctgcctcagcctcccaagtagctgggactacaggcgcccgccactatgcccggctaattttttgtatttttagtagagacggggtttcaccgttttagccgggatggtctcgatctcctgacctcgtgatccgcccgccttggcctcccaaagtgctgggattacaggcgtgagccaccgcgc

SEQ ID NO: 183 - DNA, 301 bp, Homo sapiens
ttttttttttttttttttttgagacggagtctcgctctgtcgcccaggctggagtgcagtggcgcgatctcggctcactgcaagctccgcctcccgggttcacgccattctcctgcctcagcctcccgagtagctgggactacaggcgcccgccaccacgcccggctaattttttgtatttttagtagagacggggtttcaccgtgttagccaggatggtctcgatctcctgacctcgtgatccgcccgcctcggcctcccaaagtgctgggattacaggcgtgagccaccgtgcctggcc

SEQ ID NO: 184 - DNA, 233 bp, Homo sapiens
ttgagacggagtctcgctctgtcgcccaggctggagtgcagtggcgggatctcagctcactgcaagctccgcctcccgggttcacgccattctcctgcctcagcctcccgagtagctgggactacaggcgcccgccactacgcccggctaattttttgtatttttagtagagacggggtttcaccgttttagccgggatggtctcgatctcctgacctcgtgatccgcccgcc

SEQ ID NO: 185 - DNA, 253 bp, Homo sapiens
ttttttttttttttttttttttgagacggagtctcgctctgtcgcccaggctggagtgcagtggcgggatctcggctcactgcaagctccgcctcccgggttcacgccattctcctgcctcagcctcccaagtagctgggactacaggcgcccgccactatgcccggctaattttttgtatttttagtagagacggggtttcaccgttttagctgggatggtctcgatctcctgacctcgtgatccgcccgcc

SEQ ID NO: 186 - DNA, 214 bp, Homo sapiens
tcctgggttcacgccattctcctgcctcagcctcccgagtagctgggactacaggcgcccgccaccgtgcccggctaattttttgtatttttagtagagacggggtttcaccttgttagccaggatggtctcgatctcctgacctcatgatccacccgcctcggcctccccaagtgctgggattacaggcgtgagccaccgcgcccggccccat

SEQ ID NO: 187 - DNA, 285 bp, Homo sapiens
agacggagtctcgctctgtcgcccaggctggagtgcagtggcgcgatctcggctcactgcaagctccgcctcccgggttcacgccattctcctgcctcagcctcccgagtagctgggactacaggcgcccgctaccacgcccggctaattttttgtatttttagtagagacggggtttcaccgtgttagccaggatggtctcgatctcctgacctcatgatccgcccgcctcggcctcccaaagtgctgggattacaggcgtgagccaccgcgcccggccaattt

SEQ ID NO: 188 - DNA, 204 bp, Homo sapiens
ttcatgccattctcctgcctcagcctcctgagtagctgggactacaggcgcccaccaccgcgcccggctaattttttgtatttttagtagagacggggtttcaccgtgttagccaggatggtctcgatctcctgacctcgtcatccacccgccttggcctcccaaagtgctgggattacaaggcgtgagccactgcgcccgggc

SEQ ID NO: 189 - DNA, 150 bp, Homo sapiens
tctgcctcctgggttcacgccattctcctgcctcagcctcctgagtagctgggactacaggcacccgccaccgtgcctggctaattttttgtatttttagtagagatggggtttcaccgtgttagccaggatggtctcaatctgctgacc

SEQ ID NO: 190 - DNA, 144 bp, Homo sapiens
ttctcctgcctcagcctcctgagtagctgggactacaggcgcccaccaccatgcccagctaattttttgtatttttagtagagacggtgtttcaccgtgttagccaggatggtctcgatctcctgacctcatgatccgcccgcc

SEQ ID NO: 191 - DNA, 297 bp, Homo sapiens
ttttttttttttttttttgagacggagtctcgctctgtcgcccaggctggagtgcagtggcgcgatctcggctcactgcaagctccgcctcccgggttcacgccattctcctgcctcagcctcccgagtagctgggactacaggcgcccgctaccacgcccggctaattttttgtatttttagtagagacggggtttcaccgtgttagccaggatggtctcgatctcctgacctcgtgatccgcccgcctcggcctcccaaagtgctgggattacaggcgtgagccacgcgcccggc

SEQ ID NO: 192 - DNA, 145 bp, Homo sapiens
ctcctgggttcacgccattctcctgcctcagcctcccgagtagctgggactacaggcatctaccaccatgcccagctaattttttgtatttttagtagagacagggtttcaccgtgttagccaggatggtctcgatctcctgacc

SEQ ID NO: 193 - DNA, 237 bp, Homo sapiens
gatctcggctcactgcaagctccgcctcccgggttcacgccattctcctgcctcagcctcccgagtagctgggactacaggcgcccgccactacgcccggctaattttttgtatttttagtagagacggggtttcaccgttttagccgggatggtctcgatctcctgacctcgtgatccgcccgcctcggcctcccaaagtgctgggattacaggcgtgagccaccgcgcccggcga

SEQ ID NO: 194 - DNA, 142 bp, Homo sapiens
ccgggttcacaccattctcctgcctcagcctcctgagtagctgggactacaggcacccgccaccacgcctggctaattttttgtatttttagtagagacagggtttcatcacgttagccaggatggtctcgatctcttgacc

SEQ ID NO: 195 - DNA, 231 bp, Homo sapiens
gagacggagtctcgctctgtcgcccaggctggagtgcagtggcgggatctcggctcactgcaagctccgcctcccgggttcacgccattctcctgcctcagcctcccgagtagctgggactacaggcgcccgccactacgcccggctaattttttgtatttttagtagagacggggtttcaccgttttagccgggatggtctcgatctcctgacctcgtgatccgcccgcc

SEQ ID NO: 196 - DNA, 267 bp, Homo sapiens
cctgtcgcccaggctggagtgcagtggcgggatctcggctcactgcaagctccgcctcccgggcttcacgccattctcctgcctcagcctcccgagtagctgggactacaggcacccgctaccacgcccggctaattttttgtatttttagtagagacggggtttcaccgtgttagccaggatggtctcgatctcctgacctcgtgatccgcccgcctcggcctcccaaagtgctgggattacaggcatgagccactgcgcccagcc

SEQ ID NO: 197 - DNA, 250 bp, Homo sapiens
tttttttttttttttttttgagacggagtctcgctctgtcgcccaggctggagtgcagtggcgcgatctcggctcactgcaagctccgcctcccgggttcacgccattctcctgcctcagcctcccgagtagctgggactacaggcacccgctaccaagcccggttaattttttgtatttttagtagagacggggtttcaccgtgttagccaggatggtctcgatctcctgacctcgtgatccgcccgcc

SEQ ID NO: 198 - DNA, 239 bp, Homo sapiens
ttttttttgagacgcagtctcgctctgtcgcccaggctggagtgcagtggcgtgatctcggctcactgcaagctccgcctcccaggttcacgccattctgctgcctcagcctcctgagtagctgggactacaggtgcccgccaccatgcccaggtaattttttgtatttttagtagagacggggtttcaccgtgttagccaggatggtctcgatctcctgacctcgtgatccgcccacc

SEQ ID NO: 199 - DNA, 311 bp, Homo sapiens
ctttttttttttttttttttttttgagacggagtcttgctctgtcgcccaggctggagtgcagtggcgcgatctcggctcactgcaagctccgcctcccgggttcacgccattctcctgcctcagcctcccgagtagctgggactacaggcgcccgctaccacgcccggctaattttttgtatttttagtagagacggggtttcaccgtgttagccaggatggtctcgatctcctgacctcgtgatccgcccgcctcggcctcccaaagtgctgggattacaggcgtgagccaccgcgcccagcctgcctc

SEQ ID NO: 200 - DNA, 247 bp, Homo sapiens
tctgtcgcccaggctggagtgcagtggcgcgatctcggctcactgcaagctccacctcccgggttcacgccattctcctgcctcagcctcccgagtagctgggactacaggcgcccgctaccatgcccggctaattttttgtatttttagtagagacggggtttcaccgtgttagccaggatggtctcgatctcctgacctcgtgatccgcccgcctcggcctcccaaagtgctgggattacaggcg

SEQ ID NO: 201 - DNA, 234 bp, Homo sapiens
tttttttgagatggagtctgctctgtcgcccaggctggagtgcagtggcgtgatctcggctcactgcaagctccgcctcccaggttcacgccattctcctgcctcagcctcccgagtagctgggactacaggcgcccaccaccacgcccggctaattttttgtatttttagtagagatggggtttcaccatgttaaccaggatggtcttgatctcctgacctcgtgatccgtcc

SEQ ID NO: 202 - DNA, 276 bp, Homo sapiens
tttttttttttttttgagacggagtctcgctctgtcgcccaggctggagtgcagtggcgcgatctcggctcactgcaagctccacctcccgggttcacgccattctcctgcctcagcctcccgagtagctgggactacaggcgcccgctaccatgcccggctaattttttgtatttttagtagagacggggtttcaccgtgttagccaggatggtctcgatctcctgacctcgtgatccgcccgcctcggcctcccaaagtgctgggattacaggc

SEQ ID NO: 203 - DNA, 304 bp, Homo sapiens
tttttttttttttttttttgagacggagtctcgctctgtcgcccaggctggagtgcagtggcgggatctcggctcactgcaagctccgcctcccgggttcacgccattctcctgcctcagcctcccgagtagctgggactacaggcgcccgccactacgcccggctaattttttgtatttttagtagagacggggtttcaccgttttagccgggatggtctcgatctcctgacctcgtgatccgcccgcctcggcctcccaaagtgctgggattacaggcgtgagccaccgcgcccggcctgct

SEQ ID NO: 204 - DNA, 152 bp, Homo sapiens
tcacgccattctcctgcctcagcctcccgagtagctgggactacaggcgcccaccaccacgcccagctaattttttgtatttttagtagagacggggtttcaccatgttagccaggatggtctcgatctcctgaccttgtgatctgcccgcc

SEQ ID NO: 205 - DNA, 201 bp, Homo sapiens
ttttttttttttttttttttttttgagatggagtctcggtctgtcgcccaggctggagtgcagtggcgcgatctcggctcactgcaagctccgcctcccgggttcacgccattctcctgcctcagcctcccgagtagctgggactacaggcacccgccaccacgcccggctaattttttgtatttttagtagagacggggt

SEQ ID NO: 206 - DNA, 283 bp, Homo sapiens
ctgagacggagtctcgctctgtcgcccaggctggagtgcagtggcgggatctcggctcactgcaagctccgcctcccgggttcacgccattctcctgcctcagcctcctgagtagctgggactacaggcgcccgccactacgcccggctaattttttgtatttttagtagagacggggtttcaccgttttagccgggatggtctcgatctcctgacctcgtgatccgcccgcctcggcctcccaaagtgctgggattacaggcgtgagccaccgcgcccggcc

SEQ ID NO: 207 - DNA, 288 bp, Homo sapiens
ttttgagacggagtctcgctctgtcgcccaggctggagtgcagtggcgcgatctcggctcactgcaagctccgcctcccgggttcacgccattctcctgcctcagcctcccgagtagctgggactacaggcgcccgctaccacgcccggctaattttttgtatttttagtagagacggggtttcactgtgttacccaggatggtctcgatctcctgacctcgtgatccgcccgcctcggcctcccaaagtgctgggattacaggcgtgagccaccgcgcccggcctgc

SEQ ID NO: 208 - DNA, 228 bp, Homo sapiens
cactgcaagctccgcctcttgggttcacgccattctcctgcctcagcctcccgagtagctgggactacaggcgcccgccaccacgcccggctaattttttgtatttttagtagagacggggtttcaccgtgttagccaggatggtctcgatctcctgacctcgtgatccgcccgcctcggcctcccaaagtgctgggattacaggcgtgagccaccgcgcccggcgcc

SEQ ID NO: 209 - DNA, 288 bp, Homo sapiens
tttttttgagacggagtctcgctctgtcgcccaggctggagtgcagtggcgggatctcggctcactgcaagctccgcctcccgggttcacgccattctcctgcctcagcctcccaagtagctgggactacaggcgcccgccactatgcccggctaattttttgtatttttagtagagacggggtttcaccgttttagccgggatggtctcgatctcctgacctcgtgatccgcccgcctcggcctcccaaagtgctgggattacaggcgtgagccaccgcgcccggcc

SEQ ID NO: 210 - DNA, 141 bp, Homo sapiens
cgggttcacgccattctcctgcctcagcatcccgagtagctgggaccacaggcacccaccaccacggccggctaattttttgtatttttagtagagatagggtttcaccgttttagccaggatggtctcgatctcctgacc

SEQ ID NO: 211 - DNA, 230 bp, Homo sapiens
cggctcactgcaagctccgcctcctgggttcacgccattctcctgcctcagcctccctagtagctgggactacaggcgcccgccaccacgcccggctaattttttgtatttttagtagagacggggtttcaccatgttagccaggatggtcttgatctcctgacctcgtgatccgccctccttggcctcccaaagtgctggattacaggcgtgagccaccgcacctggcc

SEQ ID NO: 212 - DNA, 169 bp, Homo sapiens
tgatctcgctcactgcagctccgcctcccgggttcacgccattctcctgcctcagcctcccgagtagctgggactacaggaacccaccaccacgcccggctaattttttgtatttttagtagagacggggtttcaccgtgttggtcaggatggtctcaatctcctgacc

SEQ ID NO: 213 - DNA, 239 bp, Homo sapiens
ctttttttgagacggagtctcgctctgtcgcccaggctggagtgcagtggcgggatctcggctcactgcaagctccgcctcccgggttcacgccattctcctgcctcagcctcccaagtagctgggactacaggcgcccgccactacgcccggctaattttttgtatttttagtagagacggggtttcaccgttttagccgggatggtctcgatctcctgacctcgtgatccgcccgcc

SEQ ID NO: 214 - DNA, 229 bp, Homo sapiens
ctcactgcaagctccgcctcctgggttcacgccattctcctgcctcagcctcccaagtagctgggactacaggcgcccgccactacgcccggctaattttttgtatttttagtagagacggggtttcaccgttttagccgggatggtctcgatctcctgacctcgtgatccgcccgcctcggcctcccaaagtgctgggattacaggcgtgagccaccgcgcccggccc

SEQ ID NO: 215 - DNA, 173 bp, Homo sapiens
tgcaagctccgcctcccaggttcacgccattctcctgcctcagcctcccgagtagctgggactacaggtgcccaccaccacgcccagctaattttttgtatttttagtagagacggggtttcaccgtgttagccaggatggtctcgatctcctaacctcgtgatccactcgcc

SEQ ID NO: 216 - DNA, 306 bp, Homo sapiens
tttttttttttttttttttttttttgagacggagtctcgctctgtcgcccaggctggagtgcagtggcgggatctcggctcactgcaagctccgcctcctgggttcacgccattctcctgcctcagcctcccaagtagctgggactacaggcgcccgccactacgcccggctaattttttgtatttttagtagagacggggtttcaccgttttagccgggatggtctcgatctcctgacctcgtgatccgcccgcctcggcctcccaaagtgctgggattacaggcgtgagccaccgcgcccggcc

SEQ ID NO: 217 - DNA, 314 bp, Homo sapiens
taattttttttttttttttttttttttttgagacggagtctcgctctgtcgcccaggctggagtgcagtggcgcgatctcggctcactgcaagctccgcctcccgggttcacgccattctcctgcctcagcctcccgagtagctgggactacaggcgcccactaccacgcccggctaattttttgtatttttagtagagacggggtttcaccgtgttagccaggatggtctcgatctcctgacctcgtgatccgcccgcctcggcctcccaaagtgctgggattacaggcgtgagccaccgcgcccggccgggt

SEQ ID NO: 218 - DNA, 140 bp, Homo sapiens
  SITE (21): n equals a,t,g, or c
ggttcacgccattctcctgcntcagcctcccgagtagctgggactacaggcacccgccaccacgcctggctaattttttgtattttttagtagagacgaggtttcaccacgttagccaggatggtcttgatctcctgacc

SEQ ID NO: 219 - DNA, 283 bp, Homo sapiens
taagacggagtctcgctctgtcgcccaggctggagtgcagtggcgcgatctcggctcactgcaagctccgcctcccgggttcacgccattctcctgcctcagcctcccgagtagctgggactacaggcgcccgccactacgcccggctaattttttgtattttttagtagagacggggtttcaccgtgttagccaggatggtctcgatctcctgacctcgtgatccgcccgcctcggcctcccaaagtgctgggattacaggcgtgagccaccgcgcccggcc

SEQ ID NO: 220 - DNA, 223 bp, Homo sapiens
ctgcaagctccgcctcccgggttcacgccattctcctgcctcagcctcccgtgtagctgggactacaggcacgcgccaccatgcccggctaatttttgtatttttagtagagacggggtttcaccgtgttagccaggatggtctcgatctcctgacctcgtgatctgcccgtctcggcctcccaaagtgctgggattacaggcgtgagccaccgcgcccggcc

SEQ ID NO: 221 - DNA, 303 bp, Homo sapiens
ttttttttttttttttttgagacggagtctcgctctgtcgcccaggctggagtgcagtggcgggatctcggctcactgcaagctccgcctcccgggttcacgccattctcctgcctcagcctcccgagtagctgggactacaggcgcccgccactacgcccggctaattttttgtatttttagtagagacggggtttcaccgttttagccgggatggtctcgatctcctgacctcgtgatccgcccgcctcggcctcccaaagtgctgggattacaggcgtgagccaccgcgcccggcctgct

SEQ ID NO: 222 - DNA, 278 bp, Homo sapiens
ttttttttgagacggagtctcgctctgtcgcccaggctggagtgcagtggcgcgatctctgctcactgcaagctccgcctcccgggttcacgccattctcctgcctcagcctcccgagtagctgggactacaggcgcccaccaccacgcccggctaattttttgcatttttagtagaggcggggtttcaccgtgttagccaggatggtctcaatctcctgacctcgtgatccgcccgccttggcctcccaaagtgctgggattacaggcgtgagccac

SEQ ID NO: 223 - DNA, 290 bp, Homo sapiens
tttttttttgagacggagtctcgctctgtcgcccaggctggagtgcagtggcgcgatctcggctcactgcaagctccgcctcccgggttcacgccattctcctgcctcagcctcccgagtagctgggactacaggcgcccgctaccacgcccggctaattttttgtatttttagtagagacggggtttcaccgtgttagccaggatggtctcgatctcctgacctcgtgatccgcccgcctcggcctcccaaagtgctgggattacaggcgtgagccaccgcgcccggcc

SEQ ID NO: 224 - DNA, 310 bp, Homo sapiens
ttttttttttttttgagacggagtctcgctctgtcgcccaggctggagtgcagtggcgcgatctcggctcactgcaagctccgcctcccgggttcacgccattctcctgcctcagcctcccgagtagctgggactacaggcgcccgccaccacgcccggctaattttttgtatttttagtagagacggggtttcaccgtgttagccaggatggtctcgatctcctgacctcgtgatccgcccgcctcggcctcccaaagtgctgggattacaggcgtgagccaccgcgcccggccagtgtttccaaggtt

SEQ ID NO: 225 - DNA, 229 bp, Homo sapiens
ggcatgatctctgctcactgcaagctccgcctcccgggttcacgccattctcctgcctcagcctcccgagtagctgggactacaggcacccgccaccacgcccggctaattttttgtatttttagtagagacggggtttcaccgtgttagccaggatggtctcgatctcctgacctcgtgatccacccgcctcggcctccccaaagtgctgggattacaggcgtgagcc

SEQ ID NO: 226 - DNA, 299 bp, Homo sapiens
tttttttttttttgagacggagtctcgctctgtcgcccaggctggagtgcagtggcgcgatctcggctcactgcaagctccgcctcccgggttcacgccattctcctgcctcagcctcccgagtagctgggactacaggcacccgctaccacgcccggctaattttttgtatttttagtagagacggggtttcaccgtgttagccaggatggtctcgatctcctgacctcgtgatccgcccgcctcggcctcccaaagtgctgggattacaggcgtgagccaccgcgcccagccaggtt

SEQ ID NO: 227 - DNA, 2136 bp, Homo sapiens
  SITE (1655): n equals a,t,g, or c
catttctgatctacacagtatgaactgtagtctggaatatgcacttctttgtgcctgactagcttcattcttctggtttctgctcttggtcttttggctggttcacattttgcagtctgctgtttatggatagaattactgaggcagaatatgtgatatctgaaggtagcagagacctgtaattttagttattgccttagctgttgggtagggatgaactagtgaagtgggtctgggtaggctggccagaactaaaaataatttggctataaggaacaagtttctatgcttgttctttgccttggtattttccacttcttcagaatataagggccaactaccactttcttcagacatgctgcaacgtccgccatgcccagtcatgcctctgccaataggcagcactcccgcatgagacagaaaggttactgaagatactgcctagtggagtcccaggttgaagtcatactttgagctggacatagcagtgggcctgtgattacttgaatggctgtttcaacttcagaagtgaaagtggtaaaactgaatccaagagcaccttaaagattcccctccttttatagaggaagaaactgaagctaagagcagttaaatgagtttctaagactcttaactattaagtgacacagattttaaaatctggccttctgactcaaagtcaaattaattttttccccaccatgtcagtaaattaagggtgtatatgtgtgtgtcgtttgtggggggtgactagtttacacagaatggggttgttgaggcttacctgatttctaaggtattttccagagttttcctctggtatattcagactgtattacaacaatatcttcctcacccccttttttttttttttggacagggtttcctctcacccaggctggagtgcagtgatgtgatcacggcccactgcagccttgacttactgggctcaggcaattctcccacctcagccttctgagtagctgggaccacaattgtgatcaccatgcccacctaaatttttgtactctttgtagagacagggttttgccatgttgcccaggctggtctcaaactcctgggctcaagcaatctgcccacctcagcctcccaaagtgctgggattacaggtgtgagccatggcacccagccatctccagactttcataattttcctcacatattgtacatacttaattatattattcaattatatgtataaaaaaagaaagcaagaattcaactatgttgtattaccaaggcctttctgtacccaatctcgcctcatattttttcttttttttttattttttgagacggagtcttgccctgtcgcccaggctggagtgcagtggcgtgatctcagctcactgcaagctccgcctcgtgggttcacgccattctcctgcctcagcctcctgagtagctgggactacaggcacccaccaccatgcccagctaattttttgtattttttagtagagacagggtttcaccatgttagccaggatggtctcgatctcctgacctcgtgatccacctgccttgggctcccaaagtgctgggattacaggcgtgagccaccacacccggccaatcatattttttcttggtactaattagaatcatgattctcctggcattcttcattttgntatacctcacttccttttccttagcaagatctttgccatagagtatggaaaccaggttccttgccagttaatctgtattgtgctttgtcatgtattgttactaaacagctcaagatcaaggggaagaaatgtatatgaggctcagttcatgttcagtttttttttttcagcattgcaacattgccactcatcatcatgagtgtagccctgtgtcaggtactgaaggtaatggaaaaggtatataaggttgatccctgtactcttgttgggaacttgagtggtatgaatagagaaggtgagttcttggggacagaggctacagtttagcaagctttcctatgcggaccttggtaatttctttacattttatagaccaaagaacaatcttaacttgcccttttttctaaaggcattgtttaaaaactgtcatcaaatcattgcagtttatggcaaatggcctttttttaaaaaaaaaaaaaaa

SEQ ID NO: 228 - DNA, 156 bp, Homo sapiens
cccgggttcacgccattctcctgcctcagcctaccgagtagctgggactacaggcgcccaccaccgcgcccggctaattttttgtatttttagtagagacggggtttcactgtgttagccaggatgctctcgatctcctgacctcatgatccgccc

SEQ ID NO: 229 - DNA, 168 bp, Homo sapiens
ctctgtcgcccaggctggagtgcggtggcatcatctctgctcactgcaagctccacctcctgggttcacaccattctcctgcctcagcctcctaagtagctggaactacaggcgcccaccaccacgcccagctaattttttgtattttttagtagagacggggtttca

SEQ ID NO: 230 - DNA, 279 bp, Homo sapiens
gacggagtctcgctctgtcgcccaggctggagtgcagtggcgggatctcggctcactgcaagctccgcctcctgggttcacgccattctcctgcctcagcctcccaagtagctgggactacaggcgcccgccactacgcccggctaattttttgtatttttagtagagacggggtttcaccgttttagccgggatggtctcgatctcctgacctcgtgatccgcccgcctcggcctcccaaagtgctgggattacaggcgtgagccaccgcgcccggcc

SEQ ID NO: 231 - DNA, 1166 bp, Homo sapiens
gccttctgagtagctgggaccacaattgtgatcaccatgcccacctaaatttttgtactctttgtagagacagggttttgccatgttgcccaggctggtctcaaactcctgggctcaagcaatctgcccacctcagcctcccaaagtgctgggattacaggtgtgagccatggcacccagccatctccagactttcataattttcctcacatattgtacatacttaattatattattcaattatatgtataaaaaaagaaagcaagaattcaactatgttgtattaccaaggcctttctgtacccaatctcgcctcatattttttcttttttttttattttttgagacggagtcttgccctgttgcccaggctggagtgcagtggcgtgatctcagctcactgcaagctccgcctcgtgggttcacgccattctcctgcctcagcctcctgagtagctgggactacaggcacccaccaccatgcccagctaattttttgtattttttagtagagacagggtttcaccatgttagccaggatggtctcgatctcctgacctcgtgatccacctgccttgggctcccaaagtgctgggattacaggcgtgagccaccacacccggccaatcatattttttcttgttactaattagaatcatgattctcctggcattcttcattttgttatacctcacttccttttccttagcaagatctttgccatagagtatggaaaccaggttccttgccagttaatctgtattgtgctttgtcatgtattgttactaaacagctcaagatcaaggggaagaaatgtatatgaggctcagttcatgttcagtttttttttttcagcattgcaacattgccactcatcatcatgagtgtagccctgtgtcaggtactgaaggtaatggaaaaggtatataaggttgatccctgtactcttgttgggaacttgagtggtatgaatagagaaggtgagttcttggggacagaggctacagtttagcaagctttcctatgcggaccttggtaatttctttacattttatagaccaaagaacaatcttaacttgcccttttttctaaaggcattgtttaaaaactgtaatcaaatcattgcagtttatggcaaatggcctttttttaaaaaaaaaaaaaaa

SEQ ID NO: 232 - DNA, 32174 bp, Homo sapiens
  SITE (29356): n equals a,t,g, or c
  SITE (29357): n equals a,t,g, or c
  SITE (29358): n equals a,t,g, or c
  SITE (29359): n equals a,t,g, or c
  SITE (29360): n equals a,t,g, or c
  SITE (29361): n equals a,t,g, or c
  SITE (29362): n equals a,t,g, or c
  SITE (29363): n equals a,t,g, or c
  SITE (29364): n equals a,t,g, or c
  SITE (29365): n equals a,t,g, or c
  SITE (29366): n equals a,t,g, or c
  SITE (29367): n equals a,t,g, or c
  SITE (29368): n equals a,t,g, or c
  SITE (29369): n equals a,t,g, or c
  SITE (29370): n equals a,t,g, or c
  SITE (29371): n equals a,t,g, or c
  SITE (29372): n equals a,t,g, or c
  SITE (29373): n equals a,t,g, or c
  SITE (29374): n equals a,t,g, or c
  SITE (29375): n equals a,t,g, or c
  SITE (29376): n equals a,t,g, or c
  SITE (29377): n equals a,t,g, or c
  SITE (29378): n equals a,t,g, or c
  SITE (29379): n equals a,t,g, or c
  SITE (29380): n equals a,t,g, or c
  SITE (29381): n equals a,t,g, or c
  SITE (29382): n equals a,t,g, or c
  SITE (29383): n equals a,t,g, or c
  SITE (29384): n equals a,t,g, or c
  SITE (29385): n equals a,t,g, or c
  SITE (29386): n equals a,t,g, or c
  SITE (29387): n equals a,t,g, or c
  SITE (29388): n equals a,t,g, or c
  SITE (29389): n equals a,t,g, or c
  SITE (29390): n equals a,t,g, or c
  SITE (29391): n equals a,t,g, or c
  SITE (29392): n equals a,t,g, or c
  SITE (29393): n equals a,t,g, or c
  SITE (29394): n equals a,t,g, or c
  SITE (29395): n equals a,t,g, or c
  SITE (29396): n equals a,t,g, or c
  SITE (29397): n equals a,t,g, or c
  SITE (29398): n equals a,t,g, or c
  SITE (29399): n equals a,t,g, or c
  SITE (29400): n equals a,t,g, or c
  SITE (29401): n equals a,t,g, or c
  SITE (29402): n equals a,t,g, or c
  SITE (29403): n equals a,t,g, or c
  SITE (29404): n equals a,t,g, or c
  SITE (29405): n equals a,t,g, or c
  SITE (29406): n equals a,t,g, or c
  SITE (29407): n equals a,t,g, or c
  SITE (29408): n equals a,t,g, or c
  SITE (29409): n equals a,t,g, or c
  SITE (29410): n equals a,t,g, or c
  SITE (29411): n equals a,t,g, or c
  SITE (29412): n equals a,t,g, or c
  SITE (29413): n equals a,t,g, or c
  SITE (29414): n equals a,t,g, or c
  SITE (29415): n equals a,t,g, or c
  SITE (29416): n equals a,t,g, or c
  SITE (29417): n equals a,t,g, or c
  SITE (29418): n equals a,t,g, or c
  SITE (29419): n equals a,t,g, or c
  SITE (29420): n equals a,t,g, or c
  SITE (29421): n equals a,t,g, or c
  SITE (29422): n equals a,t,g, or c
  SITE (29423): n equals a,t,g, or c
  SITE (29424): n equals a,t,g, or c
  SITE (29425): n equals a,t,g, or c
  SITE (29426): n equals a,t,g, or c
  SITE (29427): n equals a,t,g, or c
  SITE (29428): n equals a,t,g, or c
  SITE (29429): n equals a,t,g, or c
  SITE (29430): n equals a,t,g, or c
  SITE (29431): n equals a,t,g, or c
  SITE (29432): n equals a,t,g, or c
  SITE (29433): n equals a,t,g, or c
  SITE (29434): n equals a,t,g, or c
  SITE (29435): n equals a,t,g, or c
  SITE (29436): n equals a,t,g, or c
  SITE (29437): n equals a,t,g, or c
  SITE (29438): n equals a,t,g, or c
  SITE (29439): n equals a,t,g, or c
  SITE (29440): n equals a,t,g, or c
  SITE (29441): n equals a,t,g, or c
  SITE (29442): n equals a,t,g, or c
  SITE (29443): n equals a,t,g, or c
  SITE (29444): n equals a,t,g, or c
  SITE (29445): n equals a,t,g, or c
  SITE (29446): n equals a,t,g, or c
  SITE (29447): n equals a,t,g, or c
  SITE (29448): n equals a,t,g, or c
  SITE (29449): n equals a,t,g, or c
  SITE (29450): n equals a,t,g, or c
  SITE (29451): n equals a,t,g, or c
  SITE (29452): n equals a,t,g, or c
  SITE (29453): n equals a,t,g, or c
  SITE (29454): n equals a,t,g, or c
  SITE (29455): n equals a,t,g, or c
  SITE (29456): n equals a,t,g, or c
  SITE (29457): n equals a,t,g, or c
  SITE (29458): n equals a,t,g, or c
  SITE (29459): n equals a,t,g, or c
  SITE (29460): n equals a,t,g, or c
  SITE (29461): n equals a,t,g, or c
  SITE (29462): n equals a,t,g, or c
  SITE (29463): n equals a,t,g, or c
  SITE (29464): n equals a,t,g, or c
  SITE (29465): n equals a,t,g, or c
  SITE (29466): n equals a,t,g, or c
  SITE (29467): n equals a,t,g, or c
  SITE (29468): n equals a,t,g, or c
  SITE (29469): n equals a,t,g, or c
  SITE (29470): n equals a,t,g, or c
  SITE (29471): n equals a,t,g, or c
  SITE (29472): n equals a,t,g, or c
  SITE (29473): n equals a,t,g, or c
  SITE (29474): n equals a,t,g, or c
  SITE (29475): n equals a,t,g, or c
  SITE (29476): n equals a,t,g, or c
  SITE (29477): n equals a,t,g, or c
  SITE (29478): n equals a,t,g, or c
  SITE (29479): n equals a,t,g, or c
  SITE (29480): n equals a,t,g, or c
  SITE (29481): n equals a,t,g, or c
  SITE (29482): n equals a,t,g, or c
  SITE (29483): n equals a,t,g, or c
  SITE (29484): n equals a,t,g, or c
  SITE (29485): n equals a,t,g, or c
  SITE (29486): n equals a,t,g, or c
  SITE (29487): n equals a,t,g, or c
  SITE (29488): n equals a,t,g, or c
  SITE (29489): n equals a,t,g, or c
  SITE (29490): n equals a,t,g, or c
  SITE (29491): n equals a,t,g, or c
  SITE (29492): n equals a,t,g, or c
  SITE (29493): n equals a,t,g, or c
  SITE (29494): n equals a,t,g, or c
  SITE (29495): n equals a,t,g, or c
  SITE (29496): n equals a,t,g, or c
  SITE (29497): n equals a,t,g, or c
  SITE (29498): n equals a,t,g, or c
  SITE (29499): n equals a,t,g, or c
  SITE (29500): n equals a,t,g, or c
  SITE (29501): n equals a,t,g, or c
  SITE (29502): n equals a,t,g, or c
  SITE (29503): n equals a,t,g, or c
  SITE (29504): n equals a,t,g, or c
  SITE (29505): n equals a,t,g, or c
  SITE (29506): n equals a,t,g, or c
  SITE (29507): n equals a,t,g, or c
  SITE (29508): n equals a,t,g, or c
  SITE (29509): n equals a,t,g, or c
  SITE (29510): n equals a,t,g, or c
  SITE (29511): n equals a,t,g, or c
  SITE (29512): n equals a,t,g, or c
  SITE (29513): n equals a,t,g, or c
  SITE (29514): n equals a,t,g, or c
  SITE (29515): n equals a,t,g, or c
  SITE (29516): n equals a,t,g, or c
  SITE (29517): n equals a,t,g, or c
  SITE (29518): n equals a,t,g, or c
  SITE (29519): n equals a,t,g, or c
  SITE (29520): n equals a,t,g, or c
  SITE (29521): n equals a,t,g, or c
  SITE (29522): n equals a,t,g, or c
  SITE (29523): n equals a,t,g, or c
  SITE (29524): n equals a,t,g, or c
  SITE (29525): n equals a,t,g, or c
  SITE (29526): n equals a,t,g, or c
  SITE (29527): n equals a,t,g, or c
  SITE (29528): n equals a,t,g, or c
  SITE (29529): n equals a,t,g, or c
  SITE (29530): n equals a,t,g, or c
  SITE (29531): n equals a,t,g, or c
  SITE (29532): n equals a,t,g, or c
  SITE (29533): n equals a,t,g, or c
  SITE (29534): n equals a,t,g, or c
  SITE (29535): n equals a,t,g, or c
  SITE (29536): n equals a,t,g, or c
  SITE (29537): n equals a,t,g, or c
  SITE (29538): n equals a,t,g, or c
  SITE (29539): n equals a,t,g, or c
  SITE (29540): n equals a,t,g, or c
  SITE (29541): n equals a,t,g, or c
  SITE (29542): n equals a,t,g, or c
  SITE (29543): n equals a,t,g, or c
  SITE (29544): n equals a,t,g, or c
  SITE (29545): n equals a,t,g, or c
  SITE (29546): n equals a,t,g, or c
  SITE (29547): n equals a,t,g, or c
  SITE (29548): n equals a,t,g, or c
  SITE (29549): n equals a,t,g, or c
  SITE (29550): n equals a,t,g, or c
  SITE (29551): n equals a,t,g, or c
  SITE (29552): n equals a,t,g, or c
  SITE (29553): n equals a,t,g, or c
  SITE (29554): n equals a,t,g, or c
  SITE (29555): n equals a,t,g, or c
  SITE (29556): n equals a,t,g, or c
  SITE (29557): n equals a,t,g, or c
  SITE (29558): n equals a,t,g, or c
  SITE (29559): n equals a,t,g, or c
  SITE (29560): n equals a,t,g, or c
  SITE (29561): n equals a,t,g, or c
  SITE (29562): n equals a,t,g, or c
  SITE (29563): n equals a,t,g, or c
  SITE (29564): n equals a,t,g, or c
  SITE (29565): n equals a,t,g, or c
  SITE (29566): n equals a,t,g, or c
  SITE (29567): n equals a,t,g, or c
  SITE (29568): n equals a,t,g, or c
  SITE (29569): n equals a,t,g, or c
  SITE (29570): n equals a,t,g, or c
  SITE (29571): n equals a,t,g, or c
  SITE (29572): n equals a,t,g, or c
  SITE (29573): n equals a,t,g, or c
  SITE (29574): n equals a,t,g, or c
  SITE (29575): n equals a,t,g, or c
  SITE (29576): n equals a,t,g, or c
  SITE (29577): n equals a,t,g, or c
  SITE (29578): n equals a,t,g, or c
  SITE (29579): n equals a,t,g, or c
  SITE (29580): n equals a,t,g, or c
  SITE (29581): n equals a,t,g, or c
  SITE (29582): n equals a,t,g, or c
  SITE (29583): n equals a,t,g, or c
  SITE (29584): n equals a,t,g, or c
  SITE (29585): n equals a,t,g, or c
  SITE (29586): n equals a,t,g, or c
  SITE (29587): n equals a,t,g, or c
  SITE (29588): n equals a,t,g, or c
  SITE (29589): n equals a,t,g, or c
  SITE (29590): n equals a,t,g, or c
  SITE (29591): n equals a,t,g, or c
  SITE (29592): n equals a,t,g, or c
  SITE (29593): n equals a,t,g, or c
  SITE (29594): n equals a,t,g, or c
  SITE (29595): n equals a,t,g, or c
  SITE (29596): n equals a,t,g, or c
  SITE (29597): n equals a,t,g, or c
  SITE (29598): n equals a,t,g, or c
  SITE (29599): n equals a,t,g, or c
  SITE (29600): n equals a,t,g, or c
  SITE (29601): n equals a,t,g, or c
  SITE (29602): n equals a,t,g, or c
  SITE (29603): n equals a,t,g, or c
  SITE (29604): n equals a,t,g, or c
  SITE (29605): n equals a,t,g, or c
  SITE (29606): n equals a,t,g, or c
  SITE (29607): n equals a,t,g, or c
  SITE (29608): n equals a,t,g, or c
  SITE (29609): n equals a,t,g, or c
  SITE (29610): n equals a,t,g, or c
  SITE (29611): n equals a,t,g, or c
  SITE (29612): n equals a,t,g, or c
  SITE (29613): n equals a,t,g, or c
  SITE (29614): n equals a,t,g, or c
  SITE (29615): n equals a,t,g, or c
  SITE (29616): n equals a,t,g, or c
  SITE (29617): n equals a,t,g, or c
  SITE (29618): n equals a,t,g, or c
  SITE (29619): n equals a,t,g, or c
  SITE (29620): n equals a,t,g, or c
  SITE (29621): n equals a,t,g, or c
  SITE (29622): n equals a,t,g, or c
  SITE (29623): n equals a,t,g, or c
  SITE (29624): n equals a,t,g, or c
  SITE (29625): n equals a,t,g, or c
  SITE (29626): n equals a,t,g, or c
  SITE (29627): n equals a,t,g, or c
  SITE (29628): n equals a,t,g, or c
  SITE (29629): n equals a,t,g, or c
  SITE (29630): n equals a,t,g, or c
  SITE (29631): n equals a,t,g, or c
  SITE (29632): n equals a,t,g, or c
  SITE (29633): n equals a,t,g, or c
  SITE (29634): n equals a,t,g, or c
  SITE (29635): n equals a,t,g, or c
  SITE (29636): n equals a,t,g, or c
  SITE (29637): n equals a,t,g, or c
  SITE (29638): n equals a,t,g, or c
  SITE (29639): n equals a,t,g, or c
  SITE (29640): n equals a,t,g, or c
  SITE (29641): n equals a,t,g, or c
  SITE (29642): n equals a,t,g, or c
  SITE (29643): n equals a,t,g, or c
  SITE (29644): n equals a,t,g, or c
  SITE (29645): n equals a,t,g, or c
  SITE (29646): n equals a,t,g, or c
  SITE (29647): n equals a,t,g, or c
  SITE (29648): n equals a,t,g, or c
  SITE (29649): n equals a,t,g, or c
  SITE (29650): n equals a,t,g, or c
  SITE (29651): n equals a,t,g, or c
  SITE (29652): n equals a,t,g, or c
  SITE (29653): n equals a,t,g, or c
  SITE (29654): n equals a,t,g, or c
  SITE (29655): n equals a,t,g, or c
  SITE (29656): n equals a,t,g, or c
  SITE (29657): n equals a,t,g, or c
  SITE (29658): n equals a,t,g, or c
  SITE (29659): n equals a,t,g, or c
  SITE (29660): n equals a,t,g, or c
  SITE (29661): n equals a,t,g, or c
  SITE (29662): n equals a,t,g, or c
  SITE (29663): n equals a,t,g, or c
  SITE (29664): n equals a,t,g, or c
  SITE (29665): n equals a,t,g, or c
  SITE (29666): n equals a,t,g, or c
  SITE (29667): n equals a,t,g, or c
  SITE (29668): n equals a,t,g, or c
  SITE (29669): n equals a,t,g, or c
  SITE (29670): n equals a,t,g, or c
  SITE (29671): n equals a,t,g, or c
  SITE (29672): n equals a,t,g, or c
  SITE (29673): n equals a,t,g, or c
  SITE (29674): n equals a,t,g, or c
  SITE (29675): n equals a,t,g, or c
  SITE (29676): n equals a,t,g, or c
  SITE (29677): n equals a,t,g, or c
  SITE (29678): n equals a,t,g, or c
  SITE (29679): n equals a,t,g, or c
  SITE (29680): n equals a,t,g, or c
  SITE (29681): n equals a,t,g, or c
  SITE (29682): n equals a,t,g, or c
  SITE (29683): n equals a,t,g, or c
  SITE (29684): n equals a,t,g, or c
  SITE (29685): n equals a,t,g, or c
  SITE (29686): n equals a,t,g, or c
  SITE (29687): n equals a,t,g, or c
  SITE (29688): n equals a,t,g, or c
  SITE (29689): n equals a,t,g, or c
  SITE (29690): n equals a,t,g, or c
  SITE (29691): n equals a,t,g, or c
  SITE (29692): n equals a,t,g, or c
  SITE (29693): n equals a,t,g, or c
  SITE (29694): n equals a,t,g, or c
  SITE (29695): n equals a,t,g, or c
  SITE (29696): n equals a,t,g, or c
  SITE (29697): n equals a,t,g, or c
  SITE (29698): n equals a,t,g, or c
  SITE (29699): n equals a,t,g, or c
  SITE (29700): n equals a,t,g, or c
  SITE (29701): n equals a,t,g, or c
  SITE (29702): n equals a,t,g, or c
  SITE (29703): n equals a,t,g, or c
  SITE (29704): n equals a,t,g, or c
  SITE (29705): n equals a,t,g, or c
  SITE (29706): n equals a,t,g, or c
  SITE (29707): n equals a,t,g, or c
  SITE (29708): n equals a,t,g, or c
  SITE (29709): n equals a,t,g, or c
  SITE (29710): n equals a,t,g, or c
  SITE (29711): n equals a,t,g, or c
  SITE (29712): n equals a,t,g, or c
  SITE (29713): n equals a,t,g, or c
  SITE (29714): n equals a,t,g, or c
  SITE (29715): n equals a,t,g, or c
  SITE (29716): n equals a,t,g, or c
  SITE (29717): n equals a,t,g, or c
  SITE (29718): n equals a,t,g, or c
  SITE (29719): n equals a,t,g, or c
  SITE (29720): n equals a,t,g, or c
  SITE (29721): n equals a,t,g, or c
  SITE (29722): n equals a,t,g, or c
  SITE (29723): n equals a,t,g, or c
  SITE (29724): n equals a,t,g, or c
  SITE (29725): n equals a,t,g, or c
  SITE (29726): n equals a,t,g, or c
  SITE (29727): n equals a,t,g, or c
  SITE (29728): n equals a,t,g, or c
  SITE (29729): n equals a,t,g, or c
  SITE (29730): n equals a,t,g, or c
  SITE (29731): n equals a,t,g, or c
  SITE (29732): n equals a,t,g, or c
  SITE (29733): n equals a,t,g, or c
  SITE (29734): n equals a,t,g, or c
  SITE (29735): n equals a,t,g, or c
  SITE (29736): n equals a,t,g, or c
  SITE (29737): n equals a,t,g, or c
  SITE (29738): n equals a,t,g, or c
  SITE (29739): n equals a,t,g, or c
  SITE (29740): n equals a,t,g, or c
  SITE (29741): n equals a,t,g, or c
  SITE (29742): n equals a,t,g, or c
  SITE (29743): n equals a,t,g, or c
  SITE (29744): n equals a,t,g, or c
  SITE (29745): n equals a,t,g, or c
  SITE (29746): n equals a,t,g, or c
  SITE (29747): n equals a,t,g, or c
  SITE (29748): n equals a,t,g, or c
  SITE (29749): n equals a,t,g, or c
  SITE (29750): n equals a,t,g, or c
  SITE (29751): n equals a,t,g, or c
  SITE (29752): n equals a,t,g, or c
  SITE (29753): n equals a,t,g, or c
  SITE (29754): n equals a,t,g, or c
  SITE (29755): n equals a,t,g, or c
  SITE (29756): n equals a,t,g, or c
  SITE (29757): n equals a,t,g, or c
  SITE (29758): n equals a,t,g, or c
  SITE (29759): n equals a,t,g, or c
  SITE (29760): n equals a,t,g, or c
  SITE (29761): n equals a,t,g, or c
  SITE (29762): n equals a,t,g, or c
  SITE (29763): n equals a,t,g, or c
  SITE (29764): n equals a,t,g, or c
  SITE (29765): n equals a,t,g, or c
  SITE (29766): n equals a,t,g, or c
  SITE (29767): n equals a,t,g, or c
  SITE (29768): n equals a,t,g, or c
  SITE (29769): n equals a,t,g, or c
  SITE (29770): n equals a,t,g, or c
  SITE (29771): n equals a,t,g, or c
  SITE (29772): n equals a,t,g, or c
  SITE (29773): n equals a,t,g, or c
  SITE (29774): n equals a,t,g, or c
  SITE (29775): n equals a,t,g, or c
  SITE (29776): n equals a,t,g, or c
  SITE (29777): n equals a,t,g, or c
  SITE (29778): n equals a,t,g, or c
  SITE (29779): n equals a,t,g, or c
  SITE (29780): n equals a,t,g, or c
  SITE (29781): n equals a,t,g, or c
  SITE (29782): n equals a,t,g, or c
  SITE (29783): n equals a,t,g, or c
  SITE (29784): n equals a,t,g, or c
  SITE (29785): n equals a,t,g, or c
  SITE (29786): n equals a,t,g, or c
  SITE (29787): n equals a,t,g, or c
  SITE (29788): n equals a,t,g, or c
  SITE (29789): n equals a,t,g, or c
  SITE (29790): n equals a,t,g, or c
  SITE (29791): n equals a,t,g, or c
  SITE (29792): n equals a,t,g, or c
  SITE (29793): n equals a,t,g, or c
  SITE (29794): n equals a,t,g, or c
  SITE (29795): n equals a,t,g, or c
  SITE (29796): n equals a,t,g, or c
  SITE (29797): n equals a,t,g, or c
  SITE (29798): n equals a,t,g, or c
  SITE (29799): n equals a,t,g, or c
  SITE (29800): n equals a,t,g, or c
  SITE (29801): n equals a,t,g, or c
  SITE (29802): n equals a,t,g, or c
  SITE (29803): n equals a,t,g, or c
  SITE (29804): n equals a,t,g, or c
  SITE (29805): n equals a,t,g, or c
  SITE (29806): n equals a,t,g, or c
  SITE (29807): n equals a,t,g, or c
  SITE (29808): n equals a,t,g, or c
  SITE (29809): n equals a,t,g, or c
  SITE (29810): n equals a,t,g, or c
  SITE (29811): n equals a,t,g, or c
  SITE (29812): n equals a,t,g, or c
  SITE (29813): n equals a,t,g, or c
  SITE (29814): n equals a,t,g, or c
  SITE (29815): n equals a,t,g, or c
  SITE (29816): n equals a,t,g, or c
  SITE (29817): n equals a,t,g, or c
  SITE (29818): n equals a,t,g, or c
  SITE (29819): n equals a,t,g, or c
  SITE (29820): n equals a,t,g, or c
  SITE (29821): n equals a,t,g, or c
  SITE (29822): n equals a,t,g, or c
  SITE (29823): n equals a,t,g, or c
  SITE (29824): n equals a,t,g, or c
  SITE (29825): n equals a,t,g, or c
  SITE (29826): n equals a,t,g, or c
  SITE (29827): n equals a,t,g, or c
  SITE (29828): n equals a,t,g, or c
  SITE (29829): n equals a,t,g, or c
  SITE (29830): n equals a,t,g, or c
  SITE (29831): n equals a,t,g, or c
  SITE (29832): n equals a,t,g, or c
  SITE (29833): n equals a,t,g, or c
  SITE (29834): n equals a,t,g, or c
  SITE (29835): n equals a,t,g, or c
  SITE (29836): n equals a,t,g, or c
  SITE (29837): n equals a,t,g, or c
  SITE (29838): n equals a,t,g, or c
  SITE (29839): n equals a,t,g, or c
  SITE (29840): n equals a,t,g, or c
  SITE (29841): n equals a,t,g, or c
  SITE (29842): n equals a,t,g, or c
  SITE (29843): n equals a,t,g, or c
  SITE (29844): n equals a,t,g, or c
  SITE (29845): n equals a,t,g, or c
  SITE (29846): n equals a,t,g, or c
  SITE (29847): n equals a,t,g, or c
  SITE (29848): n equals a,t,g, or c
  SITE (29849): n equals a,t,g, or c
  SITE (29850): n equals a,t,g, or c
  SITE (29851): n equals a,t,g, or c
  SITE (29852): n equals a,t,g, or c
  SITE (29853): n equals a,t,g, or c
  SITE (29854): n equals a,t,g, or c
  SITE (29855): n equals a,t,g, or c
  SITE (29856): n equals a,t,g, or c
  SITE (29857): n equals a,t,g, or c
  SITE (29858): n equals a,t,g, or c
  SITE (29859): n equals a,t,g, or c
  SITE (29860): n equals a,t,g, or c
  SITE (29861): n equals a,t,g, or c
  SITE (29862): n equals a,t,g, or c
  SITE (29863): n equals a,t,g, or c
  SITE (29864): n equals a,t,g, or c
  SITE (29865): n equals a,t,g, or c
  SITE (29866): n equals a,t,g, or c
  SITE (29867): n equals a,t,g, or c
  SITE (29868): n equals a,t,g, or c
  SITE (29869): n equals a,t,g, or c
  SITE (29870): n equals a,t,g, or c
  SITE (29871): n equals a,t,g, or c
  SITE (29872): n equals a,t,g, or c
  SITE (29873): n equals a,t,g, or c
  SITE (29874): n equals a,t,g, or c
  SITE (29875): n equals a,t,g, or c
  SITE (29876): n equals a,t,g, or c
  SITE (29877): n equals a,t,g, or c
  SITE (29878): n equals a,t,g, or c
  SITE (29879): n equals a,t,g, or c
  SITE (29880): n equals a,t,g, or c
  SITE (29881): n equals a,t,g, or c
  SITE (29882): n equals a,t,g, or c
  SITE (29883): n equals a,t,g, or c
  SITE (29884): n equals a,t,g, or c
  SITE (29885): n equals a,t,g, or c
  SITE (29886): n equals a,t,g, or c
  SITE (29887): n equals a,t,g, or c
  SITE (29888): n equals a,t,g, or c
  SITE (29889): n equals a,t,g, or c
  SITE (29890): n equals a,t,g, or c
  SITE (29891): n equals a,t,g, or c
  SITE (29892): n equals a,t,g, or c
  SITE (29893): n equals a,t,g, or c
  SITE (29894): n equals a,t,g, or c
  SITE (29895): n equals a,t,g, or c
  SITE (29896): n equals a,t,g, or c
  SITE (29897): n equals a,t,g, or c
  SITE (29898): n equals a,t,g, or c
  SITE (29899): n equals a,t,g, or c
  SITE (29900): n equals a,t,g, or c
  SITE (29901): n equals a,t,g, or c
  SITE (29902): n equals a,t,g, or c
  SITE (29903): n equals a,t,g, or c
  SITE (29904): n equals a,t,g, or c
  SITE (29905): n equals a,t,g, or c
  SITE (29906): n equals a,t,g, or c
  SITE (29907): n equals a,t,g, or c
  SITE (29908): n equals a,t,g, or c
  SITE (29909): n equals a,t,g, or c
  SITE (29910): n equals a,t,g, or c
  SITE (29911): n equals a,t,g, or c
  SITE (29912): n equals a,t,g, or c
  SITE (29913): n equals a,t,g, or c
  SITE (29914): n equals a,t,g, or c
  SITE (29915): n equals a,t,g, or c
  SITE (29916): n equals a,t,g, or c
  SITE (29917): n equals a,t,g, or c
  SITE (29918): n equals a,t,g, or c
  SITE (29919): n equals a,t,g, or c
  SITE (29920): n equals a,t,g, or c
  SITE (29921): n equals a,t,g, or c
  SITE (29922): n equals a,t,g, or c
  SITE (29923): n equals a,t,g, or c
  SITE (29924): n equals a,t,g, or c
  SITE (29925): n equals a,t,g, or c
  SITE (29926): n equals a,t,g, or c
  SITE (29927): n equals a,t,g, or c
  SITE (29928): n equals a,t,g, or c
  SITE (29929): n equals a,t,g, or c
  SITE (29930): n equals a,t,g, or c
  SITE (29931): n equals a,t,g, or c
  SITE (29932): n equals a,t,g, or c
  SITE (29933): n equals a,t,g, or c
  SITE (29934): n equals a,t,g, or c
  SITE (29935): n equals a,t,g, or c
  SITE (29936): n equals a,t,g, or c
  SITE (29937): n equals a,t,g, or c
  SITE (29938): n equals a,t,g, or c
  SITE (29939): n equals a,t,g, or c
  SITE (29940): n equals a,t,g, or c
  SITE (29941): n equals a,t,g, or c
  SITE (29942): n equals a,t,g, or c
  SITE (29943): n equals a,t,g, or c
  SITE (29944): n equals a,t,g, or c
  SITE (29945): n equals a,t,g, or c
  SITE (29946): n equals a,t,g, or c
  SITE (29947): n equals a,t,g, or c
  SITE (29948): n equals a,t,g, or c
  SITE (29949): n equals a,t,g, or c
  SITE (29950): n equals a,t,g, or c
  SITE (29951): n equals a,t,g, or c
  SITE (29952): n equals a,t,g, or c
  SITE (29953): n equals a,t,g, or c
  SITE (29954): n equals a,t,g, or c
  SITE (29955): n equals a,t,g, or c
  SITE (29956): n equals a,t,g, or c
  SITE (29957): n equals a,t,g, or c
  SITE (29958): n equals a,t,g, or c
  SITE (29959): n equals a,t,g, or c
  SITE (29960): n equals a,t,g, or c
  SITE (29961): n equals a,t,g, or c
  SITE (29962): n equals a,t,g, or c
  SITE (29963): n equals a,t,g, or c
  SITE (29964): n equals a,t,g, or c
  SITE (29965): n equals a,t,g, or c
  SITE (29966): n equals a,t,g, or c
  SITE (29967): n equals a,t,g, or c
  SITE (29968): n equals a,t,g, or c
  SITE (29969): n equals a,t,g, or c
  SITE (29970): n equals a,t,g, or c
  SITE (29971): n equals a,t,g, or c
  SITE (29972): n equals a,t,g, or c
  SITE (29973): n equals a,t,g, or c
  SITE (29974): n equals a,t,g, or c
  SITE (29975): n equals a,t,g, or c
  SITE (29976): n equals a,t,g, or c
  SITE (29977): n equals a,t,g, or c
  SITE (29978): n equals a,t,g, or c
  SITE (29979): n equals a,t,g, or c
  SITE (29980): n equals a,t,g, or c
  SITE (29981): n equals a,t,g, or c
  SITE (29982): n equals a,t,g, or c
  SITE (29983): n equals a,t,g, or c
  SITE (29984): n equals a,t,g, or c
  SITE (29985): n equals a,t,g, or c
  SITE (29986): n equals a,t,g, or c
  SITE (29987): n equals a,t,g, or c
  SITE (29988): n equals a,t,g, or c
  SITE (29989): n equals a,t,g, or c
  SITE (29990): n equals a,t,g, or c
  SITE (29991): n equals a,t,g, or c
  SITE (29992): n equals a,t,g, or c
  SITE (29993): n equals a,t,g, or c
  SITE (29994): n equals a,t,g, or c
  SITE (29995): n equals a,t,g, or c
  SITE (29996): n equals a,t,g, or c
  SITE (29997): n equals a,t,g, or c
  SITE (29998): n equals a,t,g, or c
  SITE (29999): n equals a,t,g, or c
  SITE (30000): n equals a,t,g, or c
  SITE (30001): n equals a,t,g, or c
  SITE (30002): n equals a,t,g, or c
  SITE (30003): n equals a,t,g, or c
  SITE (30004): n equals a,t,g, or c
  SITE (30005): n equals a,t,g, or c
  SITE (30006): n equals a,t,g, or c
  SITE (30007): n equals a,t,g, or c
  SITE (30008): n equals a,t,g, or c
  SITE (30009): n equals a,t,g, or c
  SITE (30010): n equals a,t,g, or c
  SITE (30011): n equals a,t,g, or c
  SITE (30012): n equals a,t,g, or c
  SITE (30013): n equals a,t,g, or c
  SITE (30014): n equals a,t,g, or c
  SITE (30015): n equals a,t,g, or c
  SITE (30016): n equals a,t,g, or c
  SITE (30017): n equals a,t,g, or c
  SITE (30018): n equals a,t,g, or c
  SITE (30019): n equals a,t,g, or c
  SITE (30020): n equals a,t,g, or c
  SITE (30021): n equals a,t,g, or c
  SITE (30022): n equals a,t,g, or c
  SITE (30023): n equals a,t,g, or c
  SITE (30024): n equals a,t,g, or c
  SITE (30025): n equals a,t,g, or c
  SITE (30026): n equals a,t,g, or c
  SITE (30027): n equals a,t,g, or c
  SITE (30028): n equals a,t,g, or c
  SITE (30029): n equals a,t,g, or c
  SITE (30030): n equals a,t,g, or c
  SITE (30031): n equals a,t,g, or c
  SITE (30032): n equals a,t,g, or c
  SITE (30033): n equals a,t,g, or c
  SITE (30034): n equals a,t,g, or c
  SITE (30035): n equals a,t,g, or c
  SITE (30036): n equals a,t,g, or c
  SITE (30037): n equals a,t,g, or c
  SITE (30038): n equals a,t,g, or c
  SITE (30039): n equals a,t,g, or c
  SITE (30040): n equals a,t,g, or c
  SITE (30041): n equals a,t,g, or c
  SITE (30042): n equals a,t,g, or c
  SITE (30043): n equals a,t,g, or c
  SITE (30044): n equals a,t,g, or c
  SITE (30045): n equals a,t,g, or c
  SITE (30046): n equals a,t,g, or c
  SITE (30047): n equals a,t,g, or c
  SITE (30048): n equals a,t,g, or c
  SITE (30049): n equals a,t,g, or c
  SITE (30050): n equals a,t,g, or c
  SITE (30051): n equals a,t,g, or c
  SITE (30052): n equals a,t,g, or c
  SITE (30053): n equals a,t,g, or c
  SITE (30054): n equals a,t,g, or c
  SITE (30055): n equals a,t,g, or c
  SITE (30056): n equals a,t,g, or c
  SITE (30057): n equals a,t,g, or c
  SITE (30058): n equals a,t,g, or c
  SITE (30059): n equals a,t,g, or c
  SITE (30060): n equals a,t,g, or c
  SITE (30061): n equals a,t,g, or c
  SITE (30062): n equals a,t,g, or c
  SITE (30063): n equals a,t,g, or c
  SITE (30064): n equals a,t,g, or c
  SITE (30065): n equals a,t,g, or c
  SITE (30066): n equals a,t,g, or c
  SITE (30067): n equals a,t,g, or c
  SITE (30068): n equals a,t,g, or c
  SITE (30069): n equals a,t,g, or c
  SITE (30070): n equals a,t,g, or c
  SITE (30071): n equals a,t,g, or c
  SITE (30072): n equals a,t,g, or c
  SITE (30073): n equals a,t,g, or c
  SITE (30074): n equals a,t,g, or c
  SITE (30075): n equals a,t,g, or c
  SITE (30076): n equals a,t,g, or c
  SITE (30077): n equals a,t,g, or c
  SITE (30078): n equals a,t,g, or c
  SITE (30079): n equals a,t,g, or c
  SITE (30080): n equals a,t,g, or c
  SITE (30081): n equals a,t,g, or c
  SITE (30082): n equals a,t,g, or c
  SITE (30083): n equals a,t,g, or c
  SITE (30084): n equals a,t,g, or c
  SITE (30085): n equals a,t,g, or c
  SITE (30086): n equals a,t,g, or c
  SITE (30087): n equals a,t,g, or c
  SITE (30088): n equals a,t,g, or c
  SITE (30089): n equals a,t,g, or c
  SITE (30090): n equals a,t,g, or c
  SITE (30091): n equals a,t,g, or c
  SITE (30092): n equals a,t,g, or c
  SITE (30093): n equals a,t,g, or c
  SITE (30094): n equals a,t,g, or c
  SITE (30095): n equals a,t,g, or c
  SITE (30096): n equals a,t,g, or c
  SITE (30097): n equals a,t,g, or c
  SITE (30098): n equals a,t,g, or c
  SITE (30099): n equals a,t,g, or c
  SITE (30100): n equals a,t,g, or c
  SITE (30101): n equals a,t,g, or c
  SITE (30102): n equals a,t,g, or c
  SITE (30103): n equals a,t,g, or c
  SITE (30104): n equals a,t,g, or c
  SITE (30105): n equals a,t,g, or c
  SITE (30106): n equals a,t,g, or c
  SITE (30107): n equals a,t,g, or c
  SITE (30108): n equals a,t,g, or c
  SITE (30109): n equals a,t,g, or c
  SITE (30110): n equals a,t,g, or c
  SITE (30111): n equals a,t,g, or c
  SITE (30112): n equals a,t,g, or c
  SITE (30113): n equals a,t,g, or c
  SITE (30114): n equals a,t,g, or c
  SITE (30115): n equals a,t,g, or c
  SITE (30116): n equals a,t,g, or c
  SITE (30117): n equals a,t,g, or c
  SITE (30118): n equals a,t,g, or c
  SITE (30119): n equals a,t,g, or c
  SITE (30120): n equals a,t,g, or c
  SITE (30121): n equals a,t,g, or c
  SITE (30122): n equals a,t,g, or c
  SITE (30123): n equals a,t,g, or c
  SITE (30124): n equals a,t,g, or c
  SITE (30125): n equals a,t,g, or c
  SITE (30126): n equals a,t,g, or c
  SITE (30127): n equals a,t,g, or c
  SITE (30128): n equals a,t,g, or c
  SITE (30129): n equals a,t,g, or c
  SITE (30130): n equals a,t,g, or c
  SITE (30131): n equals a,t,g, or c
  SITE (30132): n equals a,t,g, or c
  SITE (30133): n equals a,t,g, or c
  SITE (30134): n equals a,t,g, or c
  SITE (30135): n equals a,t,g, or c
  SITE (30136): n equals a,t,g, or c
  SITE (30137): n equals a,t,g, or c
  SITE (30138): n equals a,t,g, or c
  SITE (30139): n equals a,t,g, or c
  SITE (30140): n equals a,t,g, or c
  SITE (30141): n equals a,t,g, or c
  SITE (30142): n equals a,t,g, or c
  SITE (30143): n equals a,t,g, or c
  SITE (30144): n equals a,t,g, or c
  SITE (30145): n equals a,t,g, or c
  SITE (30146): n equals a,t,g, or c
  SITE (30147): n equals a,t,g, or c
  SITE (30148): n equals a,t,g, or c
  SITE (30149): n equals a,t,g, or c
  SITE (30150): n equals a,t,g, or c
  SITE (30151): n equals a,t,g, or c
  SITE (30152): n equals a,t,g, or c
  SITE (30153): n equals a,t,g, or c
  SITE (30154): n equals a,t,g, or c
  SITE (30155): n equals a,t,g, or c
  SITE (30156): n equals a,t,g, or c
  SITE (30157): n equals a,t,g, or c
  SITE (30158): n equals a,t,g, or c
  SITE (30159): n equals a,t,g, or c
  SITE (30160): n equals a,t,g, or c
  SITE (30161): n equals a,t,g, or c
  SITE (30162): n equals a,t,g, or c
  SITE (30163): n equals a,t,g, or c
  SITE (30164): n equals a,t,g, or c
  SITE (30165): n equals a,t,g, or c
  SITE (30166): n equals a,t,g, or c
  SITE (30167): n equals a,t,g, or c
  SITE (30168): n equals a,t,g, or c
  SITE (30169): n equals a,t,g, or c
  SITE (30170): n equals a,t,g, or c
  SITE (30171): n equals a,t,g, or c
  SITE (30172): n equals a,t,g, or c
  SITE (30173): n equals a,t,g, or c
  SITE (30174): n equals a,t,g, or c
  SITE (30175): n equals a,t,g, or c
  SITE (30176): n equals a,t,g, or c
  SITE (30177): n equals a,t,g, or c
  SITE (30178): n equals a,t,g, or c
  SITE (30179): n equals a,t,g, or c
  SITE (30180): n equals a,t,g, or c
  SITE (30181): n equals a,t,g, or c
  SITE (30182): n equals a,t,g, or c
  SITE (30183): n equals a,t,g, or c
  SITE (30184): n equals a,t,g, or c
  SITE (30185): n equals a,t,g, or c
  SITE (30186): n equals a,t,g, or c
  SITE (30187): n equals a,t,g, or c
  SITE (30188): n equals a,t,g, or c
  SITE (30189): n equals a,t,g, or c
  SITE (30190): n equals a,t,g, or c
  SITE (30191): n equals a,t,g, or c
  SITE (30192): n equals a,t,g, or c
  SITE (30193): n equals a,t,g, or c
  SITE (30194): n equals a,t,g, or c
  SITE (30195): n equals a,t,g, or c
  SITE (30196): n equals a,t,g, or c
  SITE (30197): n equals a,t,g, or c
  SITE (30198): n equals a,t,g, or c
  SITE (30199): n equals a,t,g, or c
  SITE (30200): n equals a,t,g, or c
  SITE (30201): n equals a,t,g, or c
  SITE (30202): n equals a,t,g, or c
  SITE (30203): n equals a,t,g, or c
  SITE (30204): n equals a,t,g, or c
  SITE (30205): n equals a,t,g, or c
  SITE (30206): n equals a,t,g, or c
  SITE (30207): n equals a,t,g, or c
  SITE (30208): n equals a,t,g, or c
  SITE (30209): n equals a,t,g, or c
  SITE (30210): n equals a,t,g, or c
  SITE (30211): n equals a,t,g, or c
  SITE (30212): n equals a,t,g, or c
  SITE (30213): n equals a,t,g, or c
  SITE (30214): n equals a,t,g, or c
  SITE (30215): n equals a,t,g, or c
  SITE (30216): n equals a,t,g, or c
  SITE (30217): n equals a,t,g, or c
  SITE (30218): n equals a,t,g, or c
  SITE (30219): n equals a,t,g, or c
  SITE (30220): n equals a,t,g, or c
  SITE (30221): n equals a,t,g, or c
  SITE (30222): n equals a,t,g, or c
  SITE (30223): n equals a,t,g, or c
  SITE (30224): n equals a,t,g, or c
  SITE (30225): n equals a,t,g, or c
  SITE (30226): n equals a,t,g, or c
  SITE (30227): n equals a,t,g, or c
  SITE (30228): n equals a,t,g, or c
  SITE (30229): n equals a,t,g, or c
  SITE (30230): n equals a,t,g, or c
  SITE (30231): n equals a,t,g, or c
  SITE (30232): n equals a,t,g, or c
  SITE (30233): n equals a,t,g, or c
  SITE (30234): n equals a,t,g, or c
  SITE (30235): n equals a,t,g, or c
  SITE (30236): n equals a,t,g, or c
  SITE (30237): n equals a,t,g, or c
  SITE (30238): n equals a,t,g, or c
  SITE (30239): n equals a,t,g, or c
  SITE (30240): n equals a,t,g, or c
  SITE (30241): n equals a,t,g, or c
  SITE (30242): n equals a,t,g, or c
  SITE (30243): n equals a,t,g, or c
  SITE (30244): n equals a,t,g, or c
  SITE (30245): n equals a,t,g, or c
  SITE (30246): n equals a,t,g, or c
  SITE (30247): n equals a,t,g, or c
  SITE (30248): n equals a,t,g, or c
  SITE (30249): n equals a,t,g, or c
  SITE (30250): n equals a,t,g, or c
  SITE (30251): n equals a,t,g, or c
  SITE (30252): n equals a,t,g, or c
  SITE (30253): n equals a,t,g, or c
  SITE (30254): n equals a,t,g, or c
  SITE (30255): n equals a,t,g, or c
  SITE (30256): n equals a,t,g, or c
  SITE (30257): n equals a,t,g, or c
  SITE (30258): n equals a,t,g, or c
  SITE (30259): n equals a,t,g, or c
  SITE (30260): n equals a,t,g, or c
  SITE (30261): n equals a,t,g, or c
  SITE (30262): n equals a,t,g, or c
  SITE (30263): n equals a,t,g, or c
  SITE (30264): n equals a,t,g, or c
  SITE (30265): n equals a,t,g, or c
  SITE (30266): n equals a,t,g, or c
  SITE (30267): n equals a,t,g, or c
  SITE (30268): n equals a,t,g, or c
  SITE (30269): n equals a,t,g, or c
  SITE (30270): n equals a,t,g, or c
  SITE (30271): n equals a,t,g, or c
  SITE (30272): n equals a,t,g, or c
  SITE (30273): n equals a,t,g, or c
  SITE (30274): n equals a,t,g, or c
  SITE (30275): n equals a,t,g, or c
  SITE (30276): n equals a,t,g, or c
  SITE (30277): n equals a,t,g, or c
  SITE (30278): n equals a,t,g, or c
  SITE (30279): n equals a,t,g, or c
  SITE (30280): n equals a,t,g, or c
  SITE (30281): n equals a,t,g, or c
  SITE (30282): n equals a,t,g, or c
  SITE (30283): n equals a,t,g, or c
  SITE (30284): n equals a,t,g, or c
  SITE (30285): n equals a,t,g, or c
  SITE (30286): n equals a,t,g, or c
  SITE (30287): n equals a,t,g, or c
  SITE (30288): n equals a,t,g, or c
  SITE (30289): n equals a,t,g, or c
  SITE (30290): n equals a,t,g, or c
  SITE (30291): n equals a,t,g, or c
  SITE (30292): n equals a,t,g, or c
  SITE (30293): n equals a,t,g, or c
  SITE (30294): n equals a,t,g, or c
  SITE (30295): n equals a,t,g, or c
  SITE (30296): n equals a,t,g, or c
  SITE (30297): n equals a,t,g, or c
  SITE (30298): n equals a,t,g, or c
  SITE (30299): n equals a,t,g, or c
  SITE (30300): n equals a,t,g, or c
  SITE (30301): n equals a,t,g, or c
  SITE (30302): n equals a,t,g, or c
  SITE (30303): n equals a,t,g, or c
  SITE (30304): n equals a,t,g, or c
  SITE (30305): n equals a,t,g, or c
  SITE (30306): n equals a,t,g, or c
  SITE (30307): n equals a,t,g, or c
  SITE (30308): n equals a,t,g, or c
  SITE (30309): n equals a,t,g, or c
  SITE (30310): n equals a,t,g, or c
  SITE (30311): n equals a,t,g, or c
  SITE (30312): n equals a,t,g, or c
  SITE (30313): n equals a,t,g, or c
  SITE (30314): n equals a,t,g, or c
  SITE (30315): n equals a,t,g, or c
  SITE (30316): n equals a,t,g, or c
  SITE (30317): n equals a,t,g, or c
  SITE (30318): n equals a,t,g, or c
  SITE (30319): n equals a,t,g, or c
  SITE (30320): n equals a,t,g, or c
  SITE (30321): n equals a,t,g, or c
  SITE (30322): n equals a,t,g, or c
  SITE (30323): n equals a,t,g, or c
  SITE (30324): n equals a,t,g, or c
  SITE (30325): n equals a,t,g, or c
  SITE (30326): n equals a,t,g, or c
  SITE (30327): n equals a,t,g, or c
  SITE (30328): n equals a,t,g, or c
  SITE (30329): n equals a,t,g, or c
  SITE (30330): n equals a,t,g, or c
  SITE (30331): n equals a,t,g, or c
  SITE (30332): n equals a,t,g, or c
  SITE (30333): n equals a,t,g, or c
  SITE (30334): n equals a,t,g, or c
  SITE (30335): n equals a,t,g, or c
  SITE (30336): n equals a,t,g, or c
  SITE (30337): n equals a,t,g, or c
  SITE (30338): n equals a,t,g, or c
  SITE (30339): n equals a,t,g, or c
  SITE (30340): n equals a,t,g, or c
  SITE (30341): n equals a,t,g, or c
  SITE (30342): n equals a,t,g, or c
  SITE (30343): n equals a,t,g, or c
  SITE (30344): n equals a,t,g, or c
  SITE (30345): n equals a,t,g, or c
  SITE (30346): n equals a,t,g, or c
  SITE (30347): n equals a,t,g, or c
  SITE (30348): n equals a,t,g, or c
  SITE (30349): n equals a,t,g, or c
  SITE (30350): n equals a,t,g, or c
  SITE (30351): n equals a,t,g, or c
  SITE (30352): n equals a,t,g, or c
  SITE (30353): n equals a,t,g, or c
  SITE (30354): n equals a,t,g, or c
  SITE (30355): n equals a,t,g, or c
  SITE (30356): n equals a,t,g, or c
  SITE (30357): n equals a,t,g, or c
  SITE (30358): n equals a,t,g, or c
  SITE (30359): n equals a,t,g, or c
  SITE (30360): n equals a,t,g, or c
  SITE (30361): n equals a,t,g, or c
  SITE (30362): n equals a,t,g, or c
  SITE (30363): n equals a,t,g, or c
  SITE (30364): n equals a,t,g, or c
  SITE (30365): n equals a,t,g, or c
  SITE (30366): n equals a,t,g, or c
  SITE (30367): n equals a,t,g, or c
  SITE (30368): n equals a,t,g, or c
  SITE (30369): n equals a,t,g, or c
  SITE (30370): n equals a,t,g, or c
  SITE (30371): n equals a,t,g, or c
  SITE (30372): n equals a,t,g, or c
  SITE (30373): n equals a,t,g, or c
  SITE (30374): n equals a,t,g, or c
  SITE (30375): n equals a,t,g, or c
  SITE (30376): n equals a,t,g, or c
  SITE (30377): n equals a,t,g, or c
  SITE (30378): n equals a,t,g, or c
  SITE (30379): n equals a,t,g, or c
  SITE (30380): n equals a,t,g, or c
  SITE (30381): n equals a,t,g, or c
  SITE (30382): n equals a,t,g, or c
  SITE (30383): n equals a,t,g, or c
  SITE (30384): n equals a,t,g, or c
  SITE (30385): n equals a,t,g, or c
  SITE (30386): n equals a,t,g, or c
  SITE (30387): n equals a,t,g, or c
  SITE (30388): n equals a,t,g, or c
  SITE (30389): n equals a,t,g, or c
  SITE (30390): n equals a,t,g, or c
  SITE (30391): n equals a,t,g, or c
  SITE (30392): n equals a,t,g, or c
  SITE (30393): n equals a,t,g, or c
  SITE (30394): n equals a,t,g, or c
  SITE (30395): n equals a,t,g, or c
  SITE (30396): n equals a,t,g, or c
  SITE (30397): n equals a,t,g, or c
  SITE (30398): n equals a,t,g, or c
  SITE (30399): n equals a,t,g, or c
  SITE (30400): n equals a,t,g, or c
  SITE (30401): n equals a,t,g, or c
  SITE (30402): n equals a,t,g, or c
  SITE (30403): n equals a,t,g, or c
  SITE (30404): n equals a,t,g, or c
  SITE (30405): n equals a,t,g, or c
  SITE (30406): n equals a,t,g, or c
  SITE (30407): n equals a,t,g, or c
  SITE (30408): n equals a,t,g, or c
  SITE (30409): n equals a,t,g, or c
  SITE (30410): n equals a,t,g, or c
  SITE (30411): n equals a,t,g, or c
  SITE (30412): n equals a,t,g, or c
  SITE (30413): n equals a,t,g, or c
  SITE (30414): n equals a,t,g, or c
  SITE (30415): n equals a,t,g, or c
  SITE (30416): n equals a,t,g, or c
  SITE (30417): n equals a,t,g, or c
  SITE (30418): n equals a,t,g, or c
  SITE (30419): n equals a,t,g, or c
  SITE (30420): n equals a,t,g, or c
  SITE (30421): n equals a,t,g, or c
  SITE (30422): n equals a,t,g, or c
  SITE (30423): n equals a,t,g, or c
  SITE (30424): n equals a,t,g, or c
  SITE (30425): n equals a,t,g, or c
  SITE (30426): n equals a,t,g, or c
  SITE (30427): n equals a,t,g, or c
  SITE (30428): n equals a,t,g, or c
  SITE (30429): n equals a,t,g, or c
  SITE (30430): n equals a,t,g, or c
  SITE (30431): n equals a,t,g, or c
  SITE (30432): n equals a,t,g, or c
  SITE (30433): n equals a,t,g, or c
  SITE (30434): n equals a,t,g, or c
  SITE (30435): n equals a,t,g, or c
  SITE (30436): n equals a,t,g, or c
  SITE (30437): n equals a,t,g, or c
  SITE (30438): n equals a,t,g, or c
  SITE (30439): n equals a,t,g, or c
  SITE (30440): n equals a,t,g, or c
  SITE (30441): n equals a,t,g, or c
  SITE (30442): n equals a,t,g, or c
  SITE (30443): n equals a,t,g, or c
  SITE (30444): n equals a,t,g, or c
  SITE (30445): n equals a,t,g, or c
  SITE (30446): n equals a,t,g, or c
  SITE (30447): n equals a,t,g, or c
  SITE (30448): n equals a,t,g, or c
  SITE (30449): n equals a,t,g, or c
  SITE (30450): n equals a,t,g, or c
  SITE (30451): n equals a,t,g, or c
  SITE (30452): n equals a,t,g, or c
  SITE (30453): n equals a,t,g, or c
  SITE (30454): n equals a,t,g, or c
  SITE (30455): n equals a,t,g, or c
  SITE (30456): n equals a,t,g, or c
  SITE (30457): n equals a,t,g, or c
  SITE (30458): n equals a,t,g, or c
  SITE (30459): n equals a,t,g, or c
  SITE (30460): n equals a,t,g, or c
  SITE (30461): n equals a,t,g, or c
  SITE (30462): n equals a,t,g, or c
  SITE (30463): n equals a,t,g, or c
  SITE (30464): n equals a,t,g, or c
  SITE (30465): n equals a,t,g, or c
  SITE (30466): n equals a,t,g, or c
  SITE (30467): n equals a,t,g, or c
  SITE (30468): n equals a,t,g, or c
  SITE (30469): n equals a,t,g, or c
  SITE (30470): n equals a,t,g, or c
  SITE (30471): n equals a,t,g, or c
  SITE (30472): n equals a,t,g, or c
  SITE (30473): n equals a,t,g, or c
  SITE (30474): n equals a,t,g, or c
  SITE (30475): n equals a,t,g, or c
  SITE (30476): n equals a,t,g, or c
  SITE (30477): n equals a,t,g, or c
  SITE (30478): n equals a,t,g, or c
  SITE (30479): n equals a,t,g, or c
  SITE (30480): n equals a,t,g, or c
  SITE (30481): n equals a,t,g, or c
  SITE (30482): n equals a,t,g, or c
  SITE (30483): n equals a,t,g, or c
  SITE (30484): n equals a,t,g, or c
  SITE (30485): n equals a,t,g, or c
  SITE (30486): n equals a,t,g, or c
  SITE (30487): n equals a,t,g, or c
  SITE (30488): n equals a,t,g, or c
  SITE (30489): n equals a,t,g, or c
  SITE (30490): n equals a,t,g, or c
  SITE (30491): n equals a,t,g, or c
  SITE (30492): n equals a,t,g, or c
  SITE (30493): n equals a,t,g, or c
  SITE (30494): n equals a,t,g, or c
  SITE (30495): n equals a,t,g, or c
  SITE (30496): n equals a,t,g, or c
  SITE (30497): n equals a,t,g, or c
  SITE (30498): n equals a,t,g, or c
  SITE (30499): n equals a,t,g, or c
  SITE (30500): n equals a,t,g, or c
  SITE (30501): n equals a,t,g, or c
  SITE (30502): n equals a,t,g, or c
  SITE (30503): n equals a,t,g, or c
  SITE (30504): n equals a,t,g, or c
  SITE (30505): n equals a,t,g, or c
  SITE (30506): n equals a,t,g, or c
  SITE (30507): n equals a,t,g, or c
  SITE (30508): n equals a,t,g, or c
  SITE (30509): n equals a,t,g, or c
  SITE (30510): n equals a,t,g, or c
  SITE (30511): n equals a,t,g, or c
  SITE (30512): n equals a,t,g, or c
  SITE (30513): n equals a,t,g, or c
  SITE (30514): n equals a,t,g, or c
  SITE (30515): n equals a,t,g, or c
  SITE (30516): n equals a,t,g, or c
  SITE (30517): n equals a,t,g, or c
  SITE (30518): n equals a,t,g, or c
  SITE (30519): n equals a,t,g, or c
  SITE (30520): n equals a,t,g, or c
  SITE (30521): n equals a,t,g, or c
  SITE (30522): n equals a,t,g, or c
  SITE (30523): n equals a,t,g, or c
  SITE (30524): n equals a,t,g, or c
  SITE (30525): n equals a,t,g, or c
  SITE (30526): n equals a,t,g, or c
  SITE (30527): n equals a,t,g, or c
  SITE (30528): n equals a,t,g, or c
  SITE (30529): n equals a,t,g, or c
  SITE (30530): n equals a,t,g, or c
  SITE (30531): n equals a,t,g, or c
  SITE (30532): n equals a,t,g, or c
  SITE (30533): n equals a,t,g, or c
  SITE (30534): n equals a,t,g, or c
  SITE (30535): n equals a,t,g, or c
  SITE (30536): n equals a,t,g, or c
  SITE (30537): n equals a,t,g, or c
  SITE (30538): n equals a,t,g, or c
  SITE (30539): n equals a,t,g, or c
  SITE (30540): n equals a,t,g, or c
  SITE (30541): n equals a,t,g, or c
  SITE (30542): n equals a,t,g, or c
  SITE (30543): n equals a,t,g, or c
  SITE (30544): n equals a,t,g, or c
  SITE (30545): n equals a,t,g, or c
  SITE (30546): n equals a,t,g, or c
  SITE (30547): n equals a,t,g, or c
  SITE (30548): n equals a,t,g, or c
  SITE (30549): n equals a,t,g, or c
  SITE (30550): n equals a,t,g, or c
  SITE (30551): n equals a,t,g, or c
  SITE (30552): n equals a,t,g, or c
  SITE (30553): n equals a,t,g, or c
  SITE (30554): n equals a,t,g, or c
  SITE (30555): n equals a,t,g, or c
  SITE (30556): n equals a,t,g, or c
  SITE (30557): n equals a,t,g, or c
  SITE (30558): n equals a,t,g, or c
  SITE (30559): n equals a,t,g, or c
  SITE (30560): n equals a,t,g, or c
  SITE (30561): n equals a,t,g, or c
  SITE (30562): n equals a,t,g, or c
  SITE (30563): n equals a,t,g, or c
  SITE (30564): n equals a,t,g, or c
  SITE (30565): n equals a,t,g, or c
  SITE (30566): n equals a,t,g, or c
  SITE (30567): n equals a,t,g, or c
  SITE (30568): n equals a,t,g, or c
  SITE (30569): n equals a,t,g, or c
  SITE (30570): n equals a,t,g, or c
  SITE (30571): n equals a,t,g, or c
  SITE (30572): n equals a,t,g, or c
  SITE (30573): n equals a,t,g, or c
  SITE (30574): n equals a,t,g, or c
  SITE (30575): n equals a,t,g, or c
  SITE (30576): n equals a,t,g, or c
  SITE (30577): n equals a,t,g, or c
  SITE (30578): n equals a,t,g, or c
  SITE (30579): n equals a,t,g, or c
  SITE (30580): n equals a,t,g, or c
  SITE (30581): n equals a,t,g, or c
  SITE (30582): n equals a,t,g, or c
  SITE (30583): n equals a,t,g, or c
  SITE (30584): n equals a,t,g, or c
  SITE (30585): n equals a,t,g, or c
  SITE (30586): n equals a,t,g, or c
  SITE (30587): n equals a,t,g, or c
  SITE (30588): n equals a,t,g, or c
  SITE (30589): n equals a,t,g, or c
  SITE (30590): n equals a,t,g, or c
  SITE (30591): n equals a,t,g, or c
  SITE (30592): n equals a,t,g, or c
  SITE (30593): n equals a,t,g, or c
  SITE (30594): n equals a,t,g, or c
  SITE (30595): n equals a,t,g, or c
  SITE (30596): n equals a,t,g, or c
  SITE (30597): n equals a,t,g, or c
  SITE (30598): n equals a,t,g, or c
  SITE (30599): n equals a,t,g, or c
  SITE (30600): n equals a,t,g, or c
  SITE (30601): n equals a,t,g, or c
  SITE (30602): n equals a,t,g, or c
  SITE (30603): n equals a,t,g, or c
  SITE (30604): n equals a,t,g, or c
  SITE (30605): n equals a,t,g, or c
  SITE (30606): n equals a,t,g, or c
  SITE (30607): n equals a,t,g, or c
  SITE (30608): n equals a,t,g, or c
  SITE (30609): n equals a,t,g, or c
  SITE (30610): n equals a,t,g, or c
  SITE (30611): n equals a,t,g, or c
  SITE (30612): n equals a,t,g, or c
  SITE (30613): n equals a,t,g, or c
  SITE (30614): n equals a,t,g, or c
  SITE (30615): n equals a,t,g, or c
  SITE (30616): n equals a,t,g, or c
  SITE (30617): n equals a,t,g, or c
  SITE (30618): n equals a,t,g, or c
  SITE (30619): n equals a,t,g, or c
  SITE (30620): n equals a,t,g, or c
  SITE (30621): n equals a,t,g, or c
  SITE (30622): n equals a,t,g, or c
  SITE (30623): n equals a,t,g, or c
  SITE (30624): n equals a,t,g, or c
  SITE (30625): n equals a,t,g, or c
  SITE (30626): n equals a,t,g, or c
  SITE (30627): n equals a,t,g, or c
  SITE (30628): n equals a,t,g, or c
  SITE (30629): n equals a,t,g, or c
  SITE (30630): n equals a,t,g, or c
  SITE (30631): n equals a,t,g, or c
  SITE (30632): n equals a,t,g, or c
  SITE (30633): n equals a,t,g, or c
  SITE (30634): n equals a,t,g, or c
  SITE (30635): n equals a,t,g, or c
  SITE (30636): n equals a,t,g, or c
  SITE (30637): n equals a,t,g, or c
  SITE (30638): n equals a,t,g, or c
  SITE (30639): n equals a,t,g, or c
  SITE (30640): n equals a,t,g, or c
  SITE (30641): n equals a,t,g, or c
  SITE (30642): n equals a,t,g, or c
  SITE (30643): n equals a,t,g, or c
  SITE (30644): n equals a,t,g, or c
  SITE (30645): n equals a,t,g, or c
  SITE (30646): n equals a,t,g, or c
  SITE (30647): n equals a,t,g, or c
  SITE (30648): n equals a,t,g, or c
  SITE (30649): n equals a,t,g, or c
  SITE (30650): n equals a,t,g, or c
  SITE (30651): n equals a,t,g, or c
  SITE (30652): n equals a,t,g, or c
  SITE (30653): n equals a,t,g, or c
  SITE (30654): n equals a,t,g, or c
  SITE (30655): n equals a,t,g, or c
  SITE (30656): n equals a,t,g, or c
  SITE (30657): n equals a,t,g, or c
  SITE (30658): n equals a,t,g, or c
  SITE (30659): n equals a,t,g, or c
  SITE (30660): n equals a,t,g, or c
  SITE (30661): n equals a,t,g, or c
  SITE (30662): n equals a,t,g, or c
  SITE (30663): n equals a,t,g, or c
  SITE (30664): n equals a,t,g, or c
  SITE (30665): n equals a,t,g, or c
  SITE (30666): n equals a,t,g, or c
  SITE (30667): n equals a,t,g, or c
  SITE (30668): n equals a,t,g, or c
  SITE (30669): n equals a,t,g, or c
  SITE (30670): n equals a,t,g, or c
  SITE (30671): n equals a,t,g, or c
  SITE (30672): n equals a,t,g, or c
  SITE (30673): n equals a,t,g, or c
  SITE (30674): n equals a,t,g, or c
  SITE (30675): n equals a,t,g, or c
  SITE (30676): n equals a,t,g, or c
  SITE (30677): n equals a,t,g, or c
  SITE (30678): n equals a,t,g, or c
  SITE (30679): n equals a,t,g, or c
  SITE (30680): n equals a,t,g, or c
  SITE (30681): n equals a,t,g, or c
  SITE (30682): n equals a,t,g, or c
  SITE (30683): n equals a,t,g, or c
  SITE (30684): n equals a,t,g, or c
  SITE (30685): n equals a,t,g, or c
  SITE (30686): n equals a,t,g, or c
  SITE (30687): n equals a,t,g, or c
  SITE (30688): n equals a,t,g, or c
  SITE (30689): n equals a,t,g, or c
  SITE (30690): n equals a,t,g, or c
  SITE (30691): n equals a,t,g, or c
  SITE (30692): n equals a,t,g, or c
  SITE (30693): n equals a,t,g, or c
  SITE (30694): n equals a,t,g, or c
  SITE (30695): n equals a,t,g, or c
  SITE (30696): n equals a,t,g, or c
  SITE (30697): n equals a,t,g, or c
  SITE (30698): n equals a,t,g, or c
  SITE (30699): n equals a,t,g, or c
  SITE (30700): n equals a,t,g, or c
  SITE (30701): n equals a,t,g, or c
  SITE (30702): n equals a,t,g, or c
  SITE (30703): n equals a,t,g, or c
  SITE (30704): n equals a,t,g, or c
  SITE (30705): n equals a,t,g, or c
  SITE (30706): n equals a,t,g, or c
  SITE (30707): n equals a,t,g, or c
  SITE (30708): n equals a,t,g, or c
  SITE (30709): n equals a,t,g, or c
  SITE (30710): n equals a,t,g, or c
  SITE (30711): n equals a,t,g, or c
  SITE (30712): n equals a,t,g, or c
  SITE (30713): n equals a,t,g, or c
  SITE (30714): n equals a,t,g, or c
  SITE (30715): n equals a,t,g, or c
  SITE (30716): n equals a,t,g, or c
  SITE (30717): n equals a,t,g, or c
  SITE (30718): n equals a,t,g, or c
  SITE (30719): n equals a,t,g, or c
  SITE (30720): n equals a,t,g, or c
  SITE (30721): n equals a,t,g, or c
  SITE (30722): n equals a,t,g, or c
  SITE (30723): n equals a,t,g, or c
  SITE (30724): n equals a,t,g, or c
  SITE (30725): n equals a,t,g, or c
  SITE (30726): n equals a,t,g, or c
  SITE (30727): n equals a,t,g, or c
  SITE (30728): n equals a,t,g, or c
  SITE (30729): n equals a,t,g, or c
  SITE (30730): n equals a,t,g, or c
  SITE (30731): n equals a,t,g, or c
  SITE (30732): n equals a,t,g, or c
  SITE (30733): n equals a,t,g, or c
  SITE (30734): n equals a,t,g, or c
  SITE (30735): n equals a,t,g, or c
  SITE (30736): n equals a,t,g, or c
  SITE (30737): n equals a,t,g, or c
  SITE (30738): n equals a,t,g, or c
  SITE (30739): n equals a,t,g, or c
  SITE (30740): n equals a,t,g, or c
  SITE (30741): n equals a,t,g, or c
  SITE (30742): n equals a,t,g, or c
  SITE (30743): n equals a,t,g, or c
  SITE (30744): n equals a,t,g, or c
  SITE (30745): n equals a,t,g, or c
  SITE (30746): n equals a,t,g, or c
  SITE (30747): n equals a,t,g, or c
  SITE (30748): n equals a,t,g, or c
  SITE (30749): n equals a,t,g, or c
  SITE (30750): n equals a,t,g, or c
  SITE (30751): n equals a,t,g, or c
  SITE (30752): n equals a,t,g, or c
  SITE (30753): n equals a,t,g, or c
  SITE (30754): n equals a,t,g, or c
  SITE (30755): n equals a,t,g, or c
  SITE (30756): n equals a,t,g, or c
  SITE (30757): n equals a,t,g, or c
  SITE (30758): n equals a,t,g, or c
  SITE (30759): n equals a,t,g, or c
  SITE (30760): n equals a,t,g, or c
  SITE (30761): n equals a,t,g, or c
  SITE (30762): n equals a,t,g, or c
  SITE (30763): n equals a,t,g, or c
  SITE (30764): n equals a,t,g, or c
  SITE (30765): n equals a,t,g, or c
  SITE (30766): n equals a,t,g, or c
  SITE (30767): n equals a,t,g, or c
  SITE (30768): n equals a,t,g, or c
  SITE (30769): n equals a,t,g, or c
  SITE (30770): n equals a,t,g, or c
  SITE (30771): n equals a,t,g, or c
  SITE (30772): n equals a,t,g, or c
  SITE (30773): n equals a,t,g, or c
  SITE (30774): n equals a,t,g, or c
  SITE (30775): n equals a,t,g, or c
  SITE (30776): n equals a,t,g, or c
  SITE (30777): n equals a,t,g, or c
  SITE (30778): n equals a,t,g, or c
  SITE (30779): n equals a,t,g, or c
  SITE (30780): n equals a,t,g, or c
  SITE (30781): n equals a,t,g, or c
  SITE (30782): n equals a,t,g, or c
  SITE (30783): n equals a,t,g, or c
  SITE (30784): n equals a,t,g, or c
  SITE (30785): n equals a,t,g, or c
  SITE (30786): n equals a,t,g, or c
  SITE (30787): n equals a,t,g, or c
  SITE (30788): n equals a,t,g, or c
  SITE (30789): n equals a,t,g, or c
  SITE (30790): n equals a,t,g, or c
  SITE (30791): n equals a,t,g, or c
  SITE (30792): n equals a,t,g, or c
  SITE (30793): n equals a,t,g, or c
  SITE (30794): n equals a,t,g, or c
  SITE (30795): n equals a,t,g, or c
  SITE (30796): n equals a,t,g, or c
  SITE (30797): n equals a,t,g, or c
  SITE (30798): n equals a,t,g, or c
  SITE (30799): n equals a,t,g, or c
  SITE (30800): n equals a,t,g, or c
  SITE (30801): n equals a,t,g, or c
  SITE (30802): n equals a,t,g, or c
  SITE (30803): n equals a,t,g, or c
  SITE (30804): n equals a,t,g, or c
  SITE (30805): n equals a,t,g, or c
  SITE (30806): n equals a,t,g, or c
  SITE (30807): n equals a,t,g, or c
  SITE (30808): n equals a,t,g, or c
  SITE (30809): n equals a,t,g, or c
  SITE (30810): n equals a,t,g, or c
  SITE (30811): n equals a,t,g, or c
  SITE (30812): n equals a,t,g, or c
  SITE (30813): n equals a,t,g, or c
  SITE (30814): n equals a,t,g, or c
  SITE (30815): n equals a,t,g, or c
  SITE (30816): n equals a,t,g, or c
  SITE (30817): n equals a,t,g, or c
  SITE (30818): n equals a,t,g, or c
  SITE (30819): n equals a,t,g, or c
  SITE (30820): n equals a,t,g, or c
  SITE (30821): n equals a,t,g, or c
  SITE (30822): n equals a,t,g, or c
  SITE (30823): n equals a,t,g, or c
  SITE (30824): n equals a,t,g, or c
  SITE (30825): n equals a,t,g, or c
  SITE (30826): n equals a,t,g, or c
  SITE (30827): n equals a,t,g, or c
  SITE (30828): n equals a,t,g, or c
  SITE (30829): n equals a,t,g, or c
  SITE (30830): n equals a,t,g, or c
  SITE (30831): n equals a,t,g, or c
  SITE (30832): n equals a,t,g, or c
  SITE (30833): n equals a,t,g, or c
  SITE (30834): n equals a,t,g, or c
  SITE (30835): n equals a,t,g, or c
  SITE (30836): n equals a,t,g, or c
  SITE (30837): n equals a,t,g, or c
  SITE (30838): n equals a,t,g, or c
  SITE (30839): n equals a,t,g, or c
  SITE (30840): n equals a,t,g, or c
  SITE (30841): n equals a,t,g, or c
  SITE (30842): n equals a,t,g, or c
  SITE (30843): n equals a,t,g, or c
  SITE (30844): n equals a,t,g, or c
  SITE (30845): n equals a,t,g, or c
  SITE (30846): n equals a,t,g, or c
  SITE (30847): n equals a,t,g, or c
  SITE (30848): n equals a,t,g, or c
  SITE (30849): n equals a,t,g, or c
  SITE (30850): n equals a,t,g, or c
  SITE (30851): n equals a,t,g, or c
  SITE (30852): n equals a,t,g, or c
  SITE (30853): n equals a,t,g, or c
  SITE (30854): n equals a,t,g, or c
  SITE (30855): n equals a,t,g, or c
  SITE (30856): n equals a,t,g, or c
  SITE (30857): n equals a,t,g, or c
  SITE (30858): n equals a,t,g, or c
  SITE (30859): n equals a,t,g, or c
  SITE (30860): n equals a,t,g, or c
  SITE (30861): n equals a,t,g, or c
  SITE (30862): n equals a,t,g, or c
  SITE (30863): n equals a,t,g, or c
  SITE (30864): n equals a,t,g, or c
  SITE (30865): n equals a,t,g, or c
  SITE (30866): n equals a,t,g, or c
  SITE (30867): n equals a,t,g, or c
  SITE (30868): n equals a,t,g, or c
  SITE (30869): n equals a,t,g, or c
  SITE (30870): n equals a,t,g, or c
  SITE (30871): n equals a,t,g, or c
  SITE (30872): n equals a,t,g, or c
  SITE (30873): n equals a,t,g, or c
  SITE (30874): n equals a,t,g, or c
  SITE (30875): n equals a,t,g, or c
  SITE (30876): n equals a,t,g, or c
  SITE (30877): n equals a,t,g, or c
  SITE (30878): n equals a,t,g, or c
  SITE (30879): n equals a,t,g, or c
  SITE (30880): n equals a,t,g, or c
gaaggaaatttgtgattagaagccgcgctgttcttatttaagagcgttagcgcaacttccggtattgttgcaagatggccgcgcccagtgatggattcaagcctcgtgaacgaagcggtggggagcaggcacaggactgggatgctctgccacccaagcggccccgactaggggcaggaaacaagatcggaggccgtaggcttattgtggtgctggaaggggccagtctggagacagtcaaggtagtttgggacaggaagtggagaagtagtaaatcgataggttgggactccgtggaatgagggtaaggggcccagagtggatgtagaaagcagagaggggtgaaagatgcttttgaaggaaggtggcttggttggctttgcgttgatttgacatcctgggatggtagtactcatttttctttctttttttttttttttttgagacggagtctcgctctgtcgcccaggctggagtgcagttgcgcgacctcggctcactgcaacttctgcctcccgccttcaaacagttctcctgactcagcctctggagtagctgggactacaggcaggtgccaccacgcccggctaatttttttgtatttttagttcagatggggtttcaccatgttggccacgctggtctcgaactcctgacctcaagtgatccgcccgcctcggcctcccaaagtgttgggattagaggcgtgagccactgtgcccggccggtagtactcattttcttttgctctttttgaatgatattctagccctcacctccttgcttccaattggtttaccaggattctgtggtatagtagtctaagcagaggaaagtttcgttccttgcgtcattccacatcccaagacaagttactgggcagatgagaaacgtagttatgtagcctagtctgcccacactttttgtaagggcttcgtgtttcaattcattagtatccatagtcacctctctctaatatccacctatgatacactgtccagacctggttattatttaaaacttttacatctgcatttttatctatcattcatctctttccccacatgtaatagaaccagcagttctctatcttaaagccttgggcagtgttcttcctcctcctttctcttacccgttagaactaattgaataggcccagaagaaatcgcattggtttagaagtcaggccaggattttaatcttcgttctaaatacacttttttttttttttttttttgagatggagtctcagtctctaccaggctggagtgcagtggcacgatcttggctcactgcagcctccgcctcccgggttcaatcgattctcctgcctcagcctccagagtagctgggattacaggcctgcgcctgtaatctattaaaagaatagaaaacatgattatatcctactaatgggttgaaactgtattattcattcaagaaggtttttttcttctataactaagggtgtctcatggacttagttcttggtcatttgttctttgtgctctctgtgacattacttcaactattcaatttcaaaatctacatcccttttttcgcagactttttggagccatatatctcaagaatgttgctagacatatacattccagtgatacataaaaacttaaccttccaaaacttgtatttgtatataacagtttgtttttagactttttactgaccaccctaatgctccttgggactccaaattgcaacttggaattatttcttttagctgctacagatgtagtccacttctttaacatcaaacttctgatgtcttttccagtgtacagagagttgttaggatagtgtctgtcagtcattcccatcctgccctgcttactccagaattatttttggctttgtgcttgatacattaggattctgtggtttacaaagcagcttcatatataatcactgccctttagtgtctcagctcccaattttcctcaaaatttcctttcttcgtttccactttttcttttttgtttcttttttgagatagggtcttgctctgttgcctgggcaacagagtgcagtggtgtgatggttcactgcagcctctacttccctggctcaagcagtcctcccacctcatcctcctgagtaactgggactgccagcaaatggcactgcgcctggctaatttttttttttttttttgtgagacagggtcccaccgtgttgcccaggccggtctcaaattcctgggctcaagtgatccttccacctcggcctcctaaagtgttgggatcacaggcataagccaccacacctggctactttgtcttgattccatctgtacctttgctcatgccagtctttcttttttcttttttttgagacagggtcttgctggagtgcagtggtacagtcttggctcactgcaatctctgtctcctgggctcaagccatcctcccaccttagcctcccaagtagctaggactacaggcatgtgccaccatgcccagctaatttttgtatttttagtagagatggggtttcgccatgttgcccaggctggtcttgaactcctgaccttaagtgatttgcctgccttggcctcccagagtgctgggattacagccgtgagccactgcatctgcccccatgcccgtcttaaaactgggaataacccctcttccttttacttctgagagttttctttgattaaactgcctcctgcatcattagttttcacatttcttttttttgagatggagtctcgctctgttgcccgggctggagtgcagtggcgctgcaagctccgcctcctgggttcatgccattctcctgcctctgcctcccaagtagctgggactacaggcgcctgccaccatgcccggctaattttttatatttttagtagagatggggtttcaccgtgttagccacgatggtctcaatctcctgaccttgtgatctgcccgcctcggcctcccaaagtgctgggattacaggcgtgagccaccacgcccggccttcacatttcttgttcagatttgcagctcttcacttagtgcatgtttggtgtacgcaaactgagggtggtgactcgatattttgcacagtacctacttactgctcctgtaataaacacagcattcagccttgctaactactaactcctgcctagttccaggatgtctcattggccttgcctaacagccacaggttttttaattaaatccagtgtattagtagataatgtgaagtcacaggttgtgcccttcctcctgtttccctctcagaccattcactggggagtgcaaataaggctgcacagtaatcccccgaagggcttgctgggctccacccccagtgttcctggtttagtaggtctagggtgggcctgagaatttgcctaacaagtttccaggtgcagctgctgctggtagtttggggaccacacttgaagaaccacggggctaggtaacagaagcttatgctgttctctcgtcatgttccctgttcttcaggtagggaagacatatgagctactcaactgtgacaagcacaagtctatattgttgaagaatggacgggaccctggggaagcgcggccagatatcacccaccaggtaactccagggacagtgctcacaaccctttgagcctctgtatggaagggttggcagctgagtgctgcctctcttcagccttaaccatgtctcggtttctgctttgctcagagtttgctgatgctgatggatagtcccctgaaccgagctggcttgctacaggtttatatccatacacagaagaatgttctgattgaagtgaatccccagacccgaattcccagaacctttgaccgcttttgtggcctcatgggtaagaagccttagaacaaagttagaatgaacttgtcagtagggaagaagggaggaagaggaaaagggagaactaaatgtggatttttaagcgagaaaatgggagaacaacatgattaataccaggacaaggactgttattatttttctatgtttgtggaaactccactcctgttcttgcagtagcttcctggctgagtgaaagagggagtctgaacccatcactgtacagctagccatatgcttggcaactgtttgttcctaacatttcaggagtccagtctagatataaagcacacagggaactcatcttatccatggggttttccttgttcgatgactggacagaaggactgtggtctccatctagctctgaactcttttttcccccttctagttcaacttttacacaagctcagtgttcgagcagctgatggcccccagaagcttttgaaggtgaggtattgaaacctgttagttgaaggctggttctgggaatgtttctggggctgacttttctctcttttttactttaggtaattaagaatccagtatcagatcactttccagttggatgtatgaaagttggcacttctttttccatcccggttgtcagtgatgtgcgtgagctggtgcccagcagtgatcctattgtttttgtggtaggggcctttgcccatggcaaggtaaggtctgggctcaaccctgaaattcttggtagagctgaacttagtatagaattcccagagcagtaggcattttaacaatgcttacaatgagctagaagacacatgacagttccacaccctgccccagggcacatcctttgagggctgctgccataattggaagtcacagttaggaccttcttcatcctttgtagggatttgatattcaacagcacagctgaaatactagctcagccatagttttcctgccctaaagaagggctgaaacagctactgagtgacagagttggctgacaaaactgttcttttcttaggtcagtgtggagtatacagagaagatggtgtccatcagtaactaccccctttctgctgccctcacctgtgcaaaacttaccacagcctttgaggaagtatggggggtcatttgacagtagtagaacctgttctgaaaccagaaactgttgatgtcacatcctttgaccctggtctgagctgactgctggaagatgatctttctgcactgagactgtggagtttggggaagccaaggctgtacatttgctatttgtttatcctatgaatactgttcttgcaaacctggttgttttggggttcctaaagtatccagtggtgtaaaactgtttgttccccgggacttcagggacagataggaggttacagagtttgcagtttggttccatgctttgaaggcaggctttagctcccagattcccatgtgctaaaggagagaaccctgatgatggagaagaactgtgaaagagagcagtcaggaatgctagtggtgaaaaactgaacaaacagaagtgattttatctaatacagttccaaggtagaaaaagtggagcaggcagggccttgcacccctctccacccccccatggggggggtggtggtagcggcacatacacaatcatagtaaattggcagaagaaaaacacaatagattcctggctagatggggagagataaggcaatgtgcatgggggaatcagaggggagatgtgagcccctctgctcctcccacaagagtttcccctttgggccgggcacggtggctcacgcctgtaatcccagcactttgggaggcggaggcgggtggatcacttgcggtcaggagttcgagaccagcctggccaacgtggtgaaatcccgtttctactgaaaatacaaaaattagctgggcatggtggcgtgcctgtattcccagctacttgggaggctgaggcaggaaaatcacttgaacccaggaggtggaggttgcggtgagctgagatcccgccactgcattccagcgtgggtgacaaagcaagacgccttctccaaaaaaaagtttcccctttggccccaaatgaagacttggctggcagcagaggcacagctggaagcatcgatcttccacctccctggcttttccattctctgctctggggcaaaggagtgctgtgaaaagggagacgagtagtttctgcaccagtcccgcacaggccacctgcaagacaagaggagtttggaaggctggttagttactcctgtaattcctggtctatagcccttccagatgtttcctagcatgcctcaataagtcacagtagtcattgcccatactgtgttccttagtagccaggctaatccttggaattcaccccagatttctaatactattgtttttttccagtctgttgctctattctgtaacctggtggtagttttagtttagctgtattaacttaccagggaaatggattattccatcttctttaacttctctttccttggcaccattgctttgtgaatataaggcaatatgaatagtaggctcaggaagaagatgtggccaaggaaatagatggatttatacacctgtggagagagaggccactaaggtagacaggcctggagtgtcctttgcaacctttgaggttgcagtgagtccctcccagtctcacaagcaggccttcacttgccttaagccatttgtcccacgtgaagaggcagaaggcagtcatggagtaacccatgaagagccagtggatggtctgttgcaccaaatagtagaagggctggaggacagtaatggcggccagcttgctcagggtggggctctcttgaatgagcctggcagcctggggagggaggaggagctcatcagcatcttgtcccttatattccccttcacccccaccctggaggcctacctgtctttccacaataacaatgaggaattccatctggaagcagaccaggtatcctgagtgcaggccgtgccagagggccaggaatagcaacgagagaccctgagagagttctttatttccaaggaacttgagtcgtttgaagatgtagctggagaaaagggtgggtggggcgaccctcaaactgactggtccttgcatcccgccacctgcctctgggtcctcaccctgaggattggattggagtgctggtgggttcccacgtgtagcccccagagggtacaggaggcagtgctgactgattacttttagagatggaaagcagacccaaggcggagctggagaccgtgtgcgcacgagccacttggttcagcagcagtgactgaggctgatgctgagatcagtggtgaaccagacactctactcaagctgcccacactctagtggtggggacaaacaagtaaagctgttgataaacagggcagtggaggacataagtccattggcagagctggagtaacacccaggtcttaacgcacttttatatcttgcctttttttcaaatatgacagtaatggtttttttgggaggggggtataggtgggggtcaaagtcagtgtgagcgacagggggttctgcccagatgggaaagacgcataggggtgacatggtacacccctgccctccaatctgggaagacagtggaaggaaggaaccagggtccaggctccccaccagcagctcaccgggccacccaggcgttggtgttgatgttgaatgaggcaatggtgccagtgaagcgggggtttgtttcaaagagccacaccttcatgttggcacaggcatcccactttgccttgcccttttcttcaaagccattgaagcccaggcccgtcaaaatgcatactccttcctgagagggaatagctcagttagggctcttgccactccccatactggcccccatggcttgtctaaataggaccttgtttcaacttttctacttactgtgaccagccaacaggtgacatatttgtacagcacaaacttgccccagatcagcatgtacatgcagcggaaccagaaggggtggttcttgagggaagaaagcacagtgcattagggatatcacatgactaggcagtttctctcagcactcttccttttcacacttgtggctggctacttcatacctgcctgagtcctgctgccagatgccctcaatagtctggcctgattgccttcacaataggcagagaggaataagcagagggcctggagaatattcattcgcctttcccttggagagcctcaagggcagcactgtatttaacttctctactgtttgccttcgttggcaaagtgtttggaatgagcatttggaatgttaagtacagaggggcccatattggattttaatttaaggagagaaacctgcccagaattactgaactgttttcaagcctttcagctgggcaggagcaaaagccagcacttccccccttcccttggtttctgaattccctagaagtgcccaaatgtatcagtcaagagaagaaaataggatggagaatcagaagctgctgtgctctgaggggtcacgtggatgtgataaggcaagctaggagcggctcctagagaaggcaacgggtgctaaatgtgcacctggcacagccctgtgcccgcgaaggttgttcagtgctggctgatgaacatgtcccagcacggctggcattgacaactcacagatctagagcaaaaccaacatgcacttgtagatgatatttcctacttctctgctatctgtagggatccttgcctgtccattttctagctctggtgcagtcatgctgctgctgctttagtagacactcacgtcatagtcttcagtgaggagatagtcttctgtgatgtgggggctgagcagtgtgtagcccactaggtagaaaaggcccagactcaggcgcttgagagcaggaatgatgctggaaaggaacgagtgaagttcctggtcacagagagcagagactattcccttcaccctctgaccttcagttatggagaggagtgtttaggggtgtggttgtctacctggaatgggatgagaagctctgctgcccaaagtgtttcctgtttcagggaaagatttctatggctggctatgaggaatggggactgcaaacctcttaagagttgtaggaaagtcagggcagcagacagtggaccagtcttgtgtttacccctcagggatgctactgatctcaaggtcttgccaggtctcacaatctccattgggactgaaaacccagtggaggtaagataataaaaataaccactttgaatctgctccttcatttcttggttgaattgatgctgaaacacaggatggacaagttctcagtgaaggaattcttctggcaattaaactttttttttttttttttttttaccattttaatttttattttctagagtcagggccttgctctgccactccggctagagtacagaggcatagtcattgctcgctgtggccttgaactcctgggctcaagcgatccccttgccttggccacctgagtagctgggactataggcatgtaccaccttgcctggataatttttttttgtagagatggggtctcactatgttgcccaggctggtcttgaactcctggcctccagtgatcctcctgccttggcctcccagagcgttggcattacaggcatgagccactgtgccctcctgcatttcctactgataaatatttttgagacaggattttgctatgttgcccagaatggagtgcagtggtgtgatcaaagctcactgcagccttgacccacctcccctggactcaagcaattctcccacttcagcctcctatgtagcttggactacagatgcatgccactatgtctgataatttttgtatttttttgtagagacagagtctctctatgttgccaggctggtctagaactcacgggctcaagtgatcctcccacctcggcctcccaaagtgctgggattatagaggtgaaaccactgtgcccagcctctatctacctacctacctatcaacctgcctacctacctatcaatcataaatatatttcatatatacatgaaaataggctttaaaggcagaaatgtgactggttcaggcaaaatcctgtggcataaatgtggatttttatgtttgtactagtgttagaatggataactggaagaaccctaaactaaaaagggcccactcctggcacagagtgcctgttacaacagtccagggcctgcatgactcaggtctctatgccagggtcatgctggagaatgcagctttcagaagagtcacttcagagtgagtgaaatacctacacaaacatctggaccaagaggggcaattacctgtttggtatctttcctggtatgtcaatcagctctccctgcaccagcttcatgtagtgattcattgagaactggggccctaccaagaaggccccatagaagtaggagaaaccagcaacttccagcagggaaggaacaccacgtatggcatatttctgttgctcagaggacaaggaattctatgccaagaagagaatgcatggttcaggatagccttgaatctccccacaagagccactttgagtgttccccacctgtgtgccccactgactggggttcttcaaatagccttctctttgggggatgacaaatagttgcttcttgtggaaatgcgtatgtgtgtgcatagctggctgttgctgctttagcaaatgccttgctggcattgatctctggactttgtgcaagagctggatcctgggcaaattagatttgttgatccttgctcagtgctatctgaaagggagattgcacaggctggggaatgagggagaggctccgctctggaatttgggttcagtcttttgttaacaacttttttcttccctttcattaagtcttgaacctctctgccgatgaatgggtacttacctgatctttccctccgtcaaagtagtcaacagccaaacctgagcagagagagaacggatgggtagggtggtgggagaggacactgaggatgtggcctgtagactgagtgcagccagaagtgtatggcggggggcggagggggggtgccgaggaagtttttagtgagatgggggagggacctacatgtaaggaaggcaggcagtgaccatcactcaccaatcagcttcaaagtcagaacacaatgtggcattgtccacttgatatcgtagttgccggtggcagtgtaatagtatccagccagaaggtaggcctaggagaggcagaagtatttattctagcatcactactatttcttctccttgctctgaaattcaatgttctctttcctttttcctttctcctcatcccatcattaaaagccttaataaattcctacaaatggaggtgctgaaaacctgtaatgggaagagcgttgctcaaggcttcttggcaaaatgagggctaaactgagatgagaatttagatgctgggaccacaggtgcatgccaccccacccggctaatttttaattttttttgtttcaccatgttgcccaggctggagggctaatttttgtattttttttgtagagatggggtttcaccatgttgcccgggttagtctcaaactcctgggctcaagcaatctgactgccttggcctcccaaggtgctgggattacaggtgtgagccactttgcctggcctaggcttaggttctttaactcattctaagttgcttttctgtcttgccttgaagtgactctgctcctggatagtgggttaaaccaaagagcctaatggcacagtatgcaaagggttagctggtggcccttccttgaggcaggcaaagagttaccattacaatctgtggatggaacacttgggcctgtgataagccacctacctgaagtcatactgctaagtgctgggagaggggttagaaattaggtctgctaatttctataccacagtcccctgcctacccctgtcccctgaaccgctgtcagctgtagcctgagctgctaagggaaagacgtttaccatctggaagcaaaaggtagtgaggacggcagtgatggtgcggcccattagtcgaaggatgaggaactgaagcacaatacacagcagggagtggtagagctggtttcctggatgcaagaagagagaatttagcctggtttttacactcccaccgtcctgagacttccaatcacaacgtaatatataaagaaaaaatgttggcatcaggatcttttttttcagaataacctcatgttttggaggagaggatggaaattatttattaaaataaaaaagattattagggtgttattttatttcttttctttttttgtttgtttttttagagatgcgacttgctctgttgtccagacttgagtgcagtagctcaatcatagctcactgcagccttgaattccgggctaccacacccagcttgttactgtatttttgaatgtctgaagtgaagaatgaatctaagtggggactgcttggctcggtcattcagttacatccacagcacagagaaactgaggattctttgttgatgaggtatggcaagggtaaccaccctcaaaatgtttttatctgacagaagaatgtacataaaagaaaaaaaggaaaagttaagctgtgttcctcttcatacaaccctctttgcaagtgggagcattataacttccctacctattagattctctcaaggaaattttgttcaagtctgttccttccaggttcccactaattgcggtgtcactgctaatttagtttactcaccaaagttaaaataagcaattgagaggcctgtaaaggtatggaagaggtggatgaggtaggtctccttgtagaaaaggtaatgccgataaaacaaagcaaaggggtaacctagatgggggaaaagataagaagagtgttatttgtgcctggtgccatcccagtttggtttggaagtttatctggcatgaaacgcagcccagagggagagagaaaaaaaaaacaacatacattatatggatggcaacagagaaggcaataacggtatccccaagaaccaaaagttttttgtaaatacaaattttgaactaaagatattaatatttgattgaggcaatataaagctgggtcctaagactaggtttcatttatagcttatgaactattgccagacattttctcttacttgaattttaaaaaatgatacaaggaagctaggcatggtggctcccatgtataatcccagcactctgggaggctgaggcaaggggattgcttgagccgaggagttcgacaccagcctgagcaacatagcgaaaccccgtctctattaaaaaacaagatacaaagatttgagcgtacccatctatgctccagaaacactcatttacactttgtgatctatcttgctagcactgtattatcagattatgaggaaaaatataaattaatatcaggctaaatactggaattgctgactgcatatatagcagttacaagttatgtggagatactcctcacagtctgtaatctgggcatcaaccaagttataaaatccatttaagtatactaaaaaaatgtcttctaaagccatgattcagagtatagtccaaaggccatgagtgaaccacagaggatcttctgatgggtcatgaactgattatacatggccaagggttgcttattgaattaaaaacggtcaataaaatttggtattcctaaactaaaattagcacattccatggctttactgcagactcaccttcagtgttctatctagaggtctggcggccatgcctggcaacatccccactgcactagtgcatatgtggaggatggggatctctcaactgctttttggaaagacattctgcctattctttcattgattattctcttgagttggtcatggtttatactttctgcaattcttgcttttatttttatttattttgagacagggtctcttgctctgtcacccaggctggagtgcagtggcacgatcatcgctcactgcagccttgacctcctgggctcaagtgatcctccaacttcagcctcttgagtagctgggaccacaggtgcttgccaccatgcctggctattttgtaatttttgtggacatgagttctcactatgttgcccaggctggccttgacctcctgggctcaaggaatcttcctgccttggcctcccaaagtgttgggattacaggcgtgagtcactgtgcctgatgaattgctgcgattcttgcttttaaattatgtaactgcagtttttatcatgggcaatacagtttactgtgagtttgcttaactctaaaacgcttagaatagtatcatacagaaataaattgctcaattatttgttaaataagtaaatgcacacaatcatgttatatgttggtttctgtccttctagtcatttttcccccatacattaaaaaaaaaaaaaaaaaaaaggctgggcgcggtggctcatgcctgtaatcccagcactatgggaggctgagacgggcggatcatgaggacaggagatcgagactatcctggctaacacggtgaaaccccgtctctactaaaaatacaaaaaaaaaaattagccgggtgtggtggcgggcgcctatagtcccagctactagggaggctgaggcaggagaatggcatgaacacgggaggcggagcttgcagtgagctgagatggcaccactgcactccagcctgggcgacagagcgagattccgtctcaaaaaaccaaaataaaacaaaacaaaaaactgtactggctggtgcagtggctcacgcctgtaaaccaaggcactttgggaggctgaggtgggtggatcacttgagatccggagtttgagaccatactggccaacatggtgaaaccccatctctaccaaaaatataaaaaattagctgggtgtggtggcgggtgcctgtaatcccagctactcgggaggctgaggcaggagaatcacttgaacctgggaggcagagtttgcagtgagctgagatcgtgccattgcactccagcttgggcaacagagcgagactctgtctcaaaacaaacaaacaaacaaatgccatttgatcttcctggtgccaggatcaactggtgtttttttttttttttgagatggagtttagctgtttttacccaggctggagagtgcaatggcacgatcttggcagctcactgcaacctccggcccctaggttcaagcgattctcctgcttcagcctcccaagtagctgggattacaggtgcccgccaccatgcccagtgaatttttgtatttttagtagagacggtatttcaccatgttggccaggctggtctcgaactcctgacctcaggtgatccacctgccttggcctcccaaagtgctaggattacaggcgtgagccaccacgcccggccaactggtgtttttttttttaattgctgttcccataataggctaggctcttaaatttatagcttcatgcaagtatagttgacccttgatcaacacaattttgaacagcaagggtccccttagacttccctctgcctctgccactgctgagatggcaaccctttctctttctcctcctccttgcctgctcaacctgaagatcatgaggaggaagacctttatgctgatccacttccactgaatgaagagtaaacatattttttcttgcttatgattctcttaataacattttcttttctatagtttactttatggtaagaaatacatatataacacaaatgacatacaaaatatatgttaatcaacttgtttatgctattggtaagtcttctattagtagttaagtttttggagagtcaaaagttatatgtggccgggtgtggtggctcatgcctgtaatctcagcactttgggaggctgaagcaggtggatcacgaggtcaggaaatcgagaccatcctggctaacatggtgaaattccgtctctactaaaatacaaaaaattagctgggcatggtggcacacacctgtagtcccagctactcaggaggctgaggcaggggaatcgcttgaacctgggaggcagaggttgcagtgagcagagattgcagtgagcagagagagccactgcactccagcctggtgacagagtgagactctgtctcaaaaaaaaaaaaaaaaaaaaaaaaagttacacctgtcggccgggtgcggcagctcacacctgtaatcccctactttgggaggcttaggcgggtgggtcgcctgagatcaggagtttgagacgagcctggccaacatggtgaaaccccatctctactaaaaatacaaaaattagttaggcgtggtgcaggcacctgtaatcccacctacttgggaagctgaggcaggagaattgcttgaacccaggaggcggaggtggcagtgagctgagatcacgccattgcactccagcttgggcaacgagcaagattctgtctcaaaaaaaaaagaaaaaaaagttttatgaggatttttgactgtacaaggggtgggatcccataggacctgcgctgttcaaggctcaactgtaattaattctacagatatcttatggattactggctcatgtattcattcaccaagtgtttagtaaatgcctgctatatgccaggtattctgtttatgaagcacgtaattgggtaggaggtggcatgtgatggttcgttttctagctggctgagatgatgggatataggatcactagctctagggaggtggagacatctatgaccctttcaggtagatcaatgagcaaggaaataggatcaagtctcatatatttcacatgggcagaaatttggcagagacagaacaccaggttagcagcaaatattgctaagaactagagccaggaactagaaagtatatagactaaatgtcaatgccttcaatcttttgctttatttttacttttgttttagtaacggggtataaataaaaaaatataaaacagtagataattatctagagcactcataaataagttctaggtagctaagtttctctctttaagcatgaaaacccttaaccatttggaatgctcgaaattaaaaaacaccacacatattactctgcctctttaagttgaatctaatttaacattttctaggtgtctggatcgtatctattccagagtaaagtcatgatggctttatgacgttctgaggtatgtgaaattgtctgcctgactctaacaaggcctacactgtcctgagttctgagttcttgtgtccacttcttatagcctgtctgtccctttccttgctactctgggatcaacagtcacctcttgaacttttggggtgcttggcaatagttcctctccctactcctaatttacggcaggccttagaaaccataaccttattttaaaggtgtaaaaaaaaaaagatttaagacaaaagcaaggggcttgggtgctttccttatggacttaggcctggtaacatctgttctggccacttagaggccttgtgtgctatttcttgttttcaggtgcgttttgcaggaggggacgttgttgagttccaaacaggtgaggtattgcacactagcaaacacatgagaagaaggcggaggaattgggagaaaaataaaaagaatgcagcaggccaggttagcaggaacgttaagacggtgacggagaacagcaaagcctggaagcaagccgccgtggagaaggaagaactgtgctgaggtgagttgctgtgacaacccaggctgattttgagtatgtaaacaccaaaccttgttcttggctgccgctcagctcagcgggctttggagcctggctgcccagccaccacttcagggatgtgctgtttttagggagggtgtgaccctacaagatgtttctgagccttaatgcttttttgtgggagccaatgcttaatatggtggctagagttacctgaagaatctataaaaaatgaccgaagccccttctgctcaccctcccactcatcagagttggcttccgtgggtctgagtgggaaggacttccacttttaacagcatgagacacggttctgacagccccactaacatccgaatgcaggccgcagtgctcagtcctgaggataaaattctcagcttggagattggggttgatgccttacctttattagcaccagatgggtttgtaacaacccagaggtttgtaagaacttgttggccgggcgccgtggctcacgcctgtaatcccagcactttgggaggccgaggcaggcggatcacctgaggtcaggagtttgagactagcctcaacatggagaaaccctgtctctactaaaaaaaatacaaaattagctgggcgtggtagtgcatgcctgtaatcccagctactcgggaggctgaggcagaattgcttgaacctgggaggtggaggttgtggtgagccgagatcacgccattgcactccagcctggcaacaagagcgaaactccatctcaaaaaaaaaaaaagaacttgtttggcagcactgtaactgttccttctttttgattgtttgtttaaagcagggacttcagaaatttattagcaggcgaaggatgatgacctttagtacactccaaacctgaggatcttctactagaatgggacctttataatccctaatgctagggacattcaaaatgcgtgttttttttttttttttttgagacagagtctctgtcgcccaggctggagtgcagtggtgcaatctcggctcactgcaagctccgcctcccgggttcacgccattctcctgcctcagcctctccgagtagctgggactacaggcgcccgccatcacgcccagctaattttttgtatttttagtagagacagggtttcaccgtggtctcgatctcctgacctcgtgatccgcccgcctcggcctcccaaagtgctgggattacaagcgtgagtcaccgtgcccggccaatgctgtggtctttcaagcagctgctgggatacatttaatttgtacaagccctcttcaggggttgtagtcaagcacagggagtggatagaactgtattattcagtctctggacttcactcagttccaagtgctgtttgtgtcagggaccagatctatcacaacgtgcattgttagcgggaacgttttcttatttcctgtacaatagttgtgagattacttattaatcctaaagttgtgaggtttcatctgaagaaacagaaatggactgtttccattaagtctggtaaatttggctgggagtggtggctcacacctgtaatcccagtgctttgggaggctgagacgggagaatcactggaacccaggagtttgagaccagcctgggcaacatagcaagactctgtctctacaaaaaataaaaaaaatagttgggtggggtgggtggtgcgtgcctgtagtcccagctacttgagaggctgaggcaggaggatcacctgagtctggggagacagaagctacaatgagctacgatgatgccactgcactccagcctgggcaacaaagttgttttttttgagaccctgtctcaaaaataaataaataaataaataaaaataaaaaaaatataagcggggcacggtggctcatgcctgtaatcccagcacttcgggaggctgaggcgggcggatcacgaggtcaggagatcgagaccatcctggttaacatggtgaaaccctgtctctactaaaaatacaaaaaattagccgggtgtggtggcgggcacctgtagccccagctactcgggaggctgaggcaggagaatggtgtgaacctgggaggcagagcttgcagtgagccgagattgtgccactgcactccagcctgggcgacacagtgagactccgcctcaaaaagaaaattaaaataaaataaataaataaataaataaataaataaataaataaattgagcaccccaaacaacttttgttaatgtgggaactatatatcaatgtctactgtgttagaaaataagactaaaaactgggtgtggtggctcactcctgtaatcccaatgctttgggaggccgaggtgggtggatcacttgaggtcaggagtttgagaccatcctggccaacatggtgaaaccctactaaaaatacaaaaaccagccagacatggtggcaggcgcctgtgatcccagctacttgggaggctgaggcaggagaatcgcttgaacccaggaggtgggggttgtagtgagctgagatcacgccactgtgctccagactaggcaacagagcgagactccaaatcaaaaaaaaaaaaaaaaggaagaaaataaaactaaaaaaaaagtaaaagatatgattaattcagtaaaaatattaacagtaaaactactacacattatattaatataaataacatactttaaatgtaaaccactatatttcccaaaacaatcaaagaaataaagccatctaatgagaagaatgccactgttttacattttcataaatttatggcctctgtctgacttaatagaagatgactggattctcaaatctgcttctgcatttaatctgttgtaatatgttagtttggttaaaatatacaaagaaaatctggctttacacagacagagaaagtatctgcattttcagataattttggatattctttagcgctacatcaaaacttgacaagtagtagtttcttaacagttaggaacttttgttataataaaacccattggcttctcttgcactttgaatggatattttaccatgcatgactttgtaacatcacacatagatcactgcaaaatactggttccctgttgttaggcagatcttctaaatactgacatatttcattagaatacatatcaaaaaatcatattccttaaatttcaccattgatttcagcagaaaagtctgtatatattgaaaagtggtcaagctcatgggagtggatacaagttttccaaaattctaatttttacttgaaagtgtaaattttatcactggctacaaatattgtcatttgtttaccttgaagtgacaggctcacttcatacagtttcaagagactgtctgccagatgcctaagtctaaaaccatagtttgtctatcattctttcaagtaaaaatggtggtcggtgaaaaaagaagctgctaaatcaatatgcaacttgaataatcgcccaaatgcttttccttgtgacaaccaccgtactctaccagtgtgcagcagaggcggtttatgcatatttcccatttcttcaaacaagtttaaaaagatgtactcaggatcaggcatggtggcccacacctcccagcactctgggaggccaagacgggtagatcactttaggtcaggagttccagaccagcctggccaacatggcgaaaccccgtctctactaaaaatacaaaaattagctgggtgtggtggtgcataccagttaaaaaaaaaagatttattcaaggactgacatttgatacaattaacaatatttagcctgggcgacagagtgaaaccccatctctaaaaacaaaacaaaacaaaacaaaaacaaaaattagccaggtgtggtggtgcacacctgtagcctcagctactcaggaggctgaggtagcatcacctgagcccaggaagttgaggcggcagtgagctgtgatgcccccaccgcactctagcctgggtaagaccctgcctcaaaaaaaaaaaacaaaaaaaatttaccacttcatcaacgattcttaagtgaaactggctctgttttgattgtgagtgcatggcagtaaagaatgcagtgaccactggtacagtttggtgtcaccgtcctgatttgtgctaaggcgccagcagttttaccaccattttgcaacatcagtgcaagtgtcaacatagggaaaagacaaatacatcttagtagtatcatgaaaataatttttaccccaaagagattccttaaagaagtctcaggaacttttaggagtagtctatggactgcatgctgatatggaatgatttgttttaatctttcatcttctaatacccaaatccactagtctttcctttctccctggtttccttgactgccctgctgtgttttcaatctttttgaaacttctctttcactggtttcattggttttgaatacagttatctcttggtgtccatgaaggattggttctagtactcgcagcagacaccacagatgctcaagtcccttatataatatggtgtagtattgcatgtaacctatgcacatcttcacatacactttaaatcatctctggattactcataatacctaatataatgtaaatgcaatgcaaatagctgctatatagcatattgttttttatttatatttttattattgtattattatttagcttagaatccatgaatgtggaacccacaaatatggagggctgactatacacagtttcctggatttttttctactgagatataatttaccataaaattcacccttcaaagtgtaaaatgtaatgttttttagtatattcaaaaggttgtcgccgggcatggtggcttatgcctgtaatcccagcactttgggagccggaggagggcagatcacgaggtcaggagatcaagaccatcctggccaacatggtgaaaccctgtctctactaacaaaaaattagctgggcgtggtggtgcctgcctgtagtcccagctactcaggaggctgagggaggagaattgcttgaacccaggaggcagagattgcagtgagctgagattgcgccactgcactccagcctggcaacagagcgagactccatctcaaaaagaaaaaaaaaaaaggttgtgcagccatccccactatctatctaatttcagaatatcttcatcacctcaagtagaaaccccatacatgttggcagtcatttcccattctctcttaactcccagagcctggcaaccattcatctactttatgtctctatagattggcctattctaggtgtttcatataaatggcgtcaggcaatgtgtagacctttgtgtctggcttatttcacttagcatgttttcaaggttcatccatgttgtagcatgtatcagtacttcattcctgtttatggctgaataatatcccgttgtatggatactctgcattcttttttttaacatttaaaaattttttatagacaaggtctcactatgttgctcaggctggtcttgaattcctgagctcaaatgatctgtccacctcagcttcccaaagtgctaggattgcaggcatgagccactacgcccagcctggatactctgcatataatctacccattcatcagctgacaaacaactgggttgtttccactttaggaacattatgaagaatgctgctacaaacattcatgcattttgtagagacagggtctcactatgttgcctaggccggtcttgaactcctggcctcaaatgatcctcctgctttggcctcccagagtgctgcaattacaggtatgagcccatgtacaagtttttgtgtgaacatatgtttttatgttttcaattctcttgggtatatacctaggaatggatctcctggatctttttcttttttttccctttgggacagagtctctctgtgttgtccaggctgaagtgcagtggcatgatcttggctcacggcaacctccgcttcccaggttcaagtgattctcctgtctcagcctcccgagtagctgggattacaggtgtgcaccaccatgcccagctaatttttgtattttcagtagagatggggtttctccatgttggccaggctagtctcgaactcctgacctcaagtgatcgacctgccttggcgtcccaaagtgctgggattacaggcgtgagccaccgggctgttgcccacgctggagtgcagtggcatgctcacagctcactgcagcctcaactttctaggttcaagtgatcctcccacctgagcctccctagcagctgggactacaggtgtgcacaggaccggctaatttcttgtagagttggagtttcaccatgttgctcaggctggtctcgaactcctgagctcaagcaatctgcccgccttggcctcccaaagtgttgggattacaggcatcagccactgtgcttggccaatgttcactcttactttctgtgcttacttctggcatgggttggctgactacaatttgaatagacccatctttccgtttctttcaccgaaggcattttttctggctcctagatgttgctgacccccaggatccagtcttggccctccactattcttgctacactgcttctttggaaactcatctactctcaagtaacttaatataatctttatgccaaagacagatccacatctttagttctaacttctttttcagttccacatttcctacttccttgctggacagttttaatttgatatttcattaccatctcaaactctgtataactaaggcataaatttctccctaaatcagccttctctgggctttttttttttttttaaattaacagtgttaccattctccaggtcacacaacattcaaaagtgtgttttcctgccagggcatggtggctccacgtctgtaatcccagcactttgggaggccaaggcaggcggatcaccaggtcaagagttcaagaccagcctgaccaacatggtgaaaccccatctctactaaaaatacaaaaattagccgggcgtggtggtgcatgcctgtaatcccagctactcaggaggctgaggcaggagaatcgcttgaacccaggaggcggaggttgcagtgagctgagatcgtctcactgtactccagcctgggcaacagagccagactccgtctcaaaaaaaaaaaaaaagtgttttccttcttcatattggttctctgttatctagtcatgaaatcctgttgattcctcctttccagtctctctcaccatcactgtcaccatgaccatcaccactccctttttcctctgctgatttgcagttaaaacccttatggatctcacccttaaatccttgcaatggcctcctacctgatctctgcctgcaccacgtcttcccagcagtcctataccggggtaatcttccttcagctcctgctcagaaaccatcaatagctcccagctgactactcaacagagtcagcaatcctgtctgttctaccttcaaaataaatccaaaatctgaccacttctctccgcctctactgcttcccctggtctgagttgccactatctctggattattattattaatatatcattattatattcaatgtattatcattatatacttgcctcctgactgatctcaccctgcctttgcctcccttcagtctagccttaatgaagcatctagagggttctattcaacttaagtcagcaggtcactcctctgctcaaagccctctcaaggcctctattctcactcagatcaaaaggctgattgccagcacccgcaggttctgtccctctgcccgggccccactgtcctctgactcatctctcaatctggcctctacccttctgctccagccccaaagctttcccttcctggaatgttaagcaggtccagccttggtgccttcacatggtaagttccttgcctggaaggctctttgcacagataagctcaaatccttcctacacctcaggtcctttgtaaaatgtcaccataagtatcagtgaggacttccctatcttatctagaagtgtatacaacactacccctccccaccctgtaaccctcccccatcacacacttcttgttcttctttcctgctttttctatttttcttctcagtacttattaccttttgacataccatatatcttacttttcagtctttcaaagcagggattatcatctactttagtccctaccgtaccccagtgcatagtacagttcctggtacacaaaatttctcaaaaagtattagctgaatggccgaacaatgagtgaacaagtgctctgtactctaggcagtcaatacaatatttattaagcactcactatgtggttagcattgcattaggcattgggggaatatggtagaattttaagaggtgctttctattcttaaggagcaaaatcaaacaatgatgttctatgctaagggctaactgtatggaatagccaatgttgtagaggttaaagagaaatcaatctcgaccacagtggtcgggagaagtagttcttgaacagagaagagatgacggcattccaagggaggataatgtagtaaagacacagcggtaggaaggagcatggggcattcactccaagagactgggctaatttcaagggaggaaaaatattgtaacaaaatggatgggaaagtgaaaaaccaggcagagtctgaaattgataaatgggaaaaaaaaaatcaattgactaggtgtaggagaaggaaaaggacaaattaaagatgtttatgccactgatataatggtcttcaggtcttcaaacctttttgctggcatagctcctagaagaattttgaaaaactgtatatcctcctttcacattttaaagttgccatctaaaccttatgtttttatttctttatttttttattttcttgagacagtacttcactctgttgcccaggctggagtgcagcggcacaatcacagctcactgcagtttcaacttcctgggttcaagtgatcctcctgcctgagcctcccaagtagctaggactataggtatgtgccgccatgcccccaaaacaacagcaaattatgtgtgtgtgtgtgtgtgtgtgtgtgtgtgtgtgtgtgtgtgtgtgtgtttcaagacacagtctcactctgttgcccaggctggagtgcagtggtgcaatcttggcttactgcaacctctgcctcccaggttcaagcgattctcctgcctcagcctcccaggtagatgggattacaactgtgtgtcaccatgcatggctgattttcttttctttttttttttttgagatggagtttcgctcttgttgcccaggctggagtgcaatggcgtgatctcggctcaccgtaacctctgcctcctgggttcaagtgattctcctgcctcagcctcccaagtagctgggattacaggcaggcgccaccacacggggctaattttgtatttttagtagagacaggatttcaccatgttggtcaggctggtctcgaactcctgacctcaggtgatcctcctgccttagcttcccaaagtgctgggattacaggcgagagccactgcacctggccgcatggctgatttttgtatttttagtagagtagggtttcaccatgttggccaggctggtcttaaactcctgacctcaagtgatctgcctgcctcagcctcctaaagtgctgggcataagccaccatccctagtcagtgtgtgtgttttgaggcagggtcttgctctgtcgcaaaggctggagtgcaatggcacagtcatggctcactgcagccttgatctcctgggctcaagtgatcttccgacctcagacccctgagtagctgagaccacaggaatgtactaccacattcagataattttaaaattttttgtagagatggcatcttgctatattgcccaggctggtcttgaactgctgggctcaagcaatcctcctgcctcagcctcacaaagtattggcattacaggtgtgagctactatgtttggccgtgtgtgtgctttctaatgcctattgaaggtgtgttttaagtgcttatggcagatgtctgccatgcaatctaaatggcaaaccaatcagctggatcagtcttacttacaacacacctggcctgtccctcaacttttctattctttcaccaaaatggaagttccttatgttagagaacttacagagaaaaggaagacaaaggaaaataggaaggagagttaagctctgcctgacactgtctacttaagtgatgggtaactgattaggttcagtgcttagaacttcatataatgagatacaaaatctcattactgacccactctgccagctagaagagcacttgtagatcatggacatttaggtggggatatagccacctttgatcctttctgttcactagattaagccttgttgctagtacaggcaggagccaacataccttccacactccagcaatcctgtacaccttgggctgagtcatatgctgaacagttattcatgaatacagattcttacttagaactgaagaattacctgctccaaacccttcattaggtagataagagactaaggtccaaaggggataactggcatgcccaaggttaacagagcagagctcaaattagaatccacatcacctgatttccattctactattcttgccacatgccttggcacttggcagtgacctgggagtgaatcactaataaccagctgtgtgctcttttaaagctacagctctattattctttgatgtccagataacaatctatgctccagcacctgtttatagacataagcacacccatttttatgtttgcttatcctcctattgaaaaatattttaaaagttcattttaatgctaaatttaggtgtactttctttgttaatctaattcttgagcactctgcacccttcagcagttcatttctgaaagttacctccacctaaatagctcaagcattgtgacagctgtgatacaggactcatggaaactgggacaagtgatcaaaaatgtctgagggaggaacaatagaggggacattttaaaggtaagctattggatagttgttacctgtgagaaagaaagaaaaagggttaggttaagaaatgttagttttttactctctcaacccagccaaacaacctaaacttgaactgtcccaaaggcctaccaaaattctttaatttcttcacttaagctgagtgctcttaataagcaagacttctgaggtgtagtgctagtgattaatgttatacacacccgttggctgactggtgaaacctgctgcaataactaaaaattattctataaaaatgtatagacagagagaatgttaaagctaaaagaggccgttgactcatttctttgttttagtagaacaggtgcaacagattgaggcactttaagacatctaaatggctttactagcaaagataaaaatcacacttgcctgtactcagggaattttatcacattctaattctttgtaaatcagtgaatcccctggtgcaacttctagccagattatctgggctttggaatcagaattatctagtttaaaatttagctctgcagcttgggcaaattacttacattctttttttttttttttttttttgagacagagtctcgctctgttcctcaggctggagtgcagtagtgcagtcttggctcactgaaacctctgcctctcaggttcaagcaattctcctgcctcagcctcccaagtagctgggactacaggcgtgtgccaccatgcctggctaatttttgtatttttagtagagatggggtttcaccatgttggtcaggctggtcttgaactcctgacctctggtgatccgcccgcctcagactcccaaagtgctgggattataggcgtgannnnnnnnnnnnnnnnnnnnnnnnnnnnnnnnnnnnnnnnnnnnnnnnnnnnnnnnnnnnnnnnnnnnnnnnnnnnnnnnnnnnnnnnnnnnnnnnnnnnnnnnnnnnnnnnnnnnnnnnnnnnnnnnnnnnnnnnnnnnnnnnnnnnnnnnnnnnnnnnnnnnnnnnnnnnnnnnnnnnnnnnnnnnnnnnnnnnnnnnnnnnnnnnnnnnnnnnnnnnnnnnnnnnnnnnnnnnnnnnnnnnnnnnnnnnnnnnnnnnnnnnnnnnnnnnnnnnnnnnnnnnnnnnnnnnnnnnnnnnnnnnnnnnnnnnnnnnnnnnnnnnnnnnnnnnnnnnnnnnnnnnnnnnnnnnnnnnnnnnnnnnnnnnnnnnnnnnnnnnnnnnnnnnnnnnnnnnnnnnnnnnnnnnnnnnnnnnnnnnnnnnnnnnnnnnnnnnnnnnnnnnnnnnnnnnnnnnnnnnnnnnnnnnnnnnnnnnnnnnnnnnnnnnnnnnnnnnnnnnnnnnnnnnnnnnnnnnnnnnnnnnnnnnnnnnnnnnnnnnnnnnnnnnnnnnnnnnnnnnnnnnnnnnnnnnnnnnnnnnnnnnnnnnnnnnnnnnnnnnnnnnnnnnnnnnnnnnnnnnnnnnnnnnnnnnnnnnnnnnnnnnnnnnnnnnnnnnnnnnnnnnnnnnnnnnnnnnnnnnnnnnnnnnnnnnnnnnnnnnnnnnnnnnnnnnnnnnnnnnnnnnnnnnnnnnnnnnnnnnnnnnnnnnnnnnnnnnnnnnnnnnnnnnnnnnnnnnnnnnnnnnnnnnnnnnnnnnnnnnnnnnnnnnnnnnnnnnnnnnnnnnnnnnnnnnnnnnnnnnnnnnnnnnnnnnnnnnnnnnnnnnnnnnnnnnnnnnnnnnnnnnnnnnnnnnnnnnnnnnnnnnnnnnnnnnnnnnnnnnnnnnnnnnnnnnnnnnnnnnnnnnnnnnnnnnnnnnnnnnnnnnnnnnnnnnnnnnnnnnnnnnnnnnnnnnnnnnnnnnnnnnnnnnnnnnnnnnnnnnnnnnnnnnnnnnnnnnnnnnnnnnnnnnnnnnnnnnnnnnnnnnnnnnnnnnnnnnnnnnnnnnnnnnnnnnnnnnnnnnnnnnnnnnnnnnnnnnnnnnnnnnnnnnnnnnnnnnnnnnnnnnnnnnnnnnnnnnnnnnnnnnnnnnnnnnnnnnnnnnnnnnnnnnnnnnnnnnnnnnnnnnnnnnnnnnnnnnnnnnnnnnnnnnnnnnnnnnnnnnnnnnnnnnnnnnnnnnnnnnnnnnnnnnnnnnnnnnnnnnnnnnnnnnnnnnnnnnnnnnnnnnnnnnnnnnnnnnnnnnnnnnnnnnnnnnnnnnnnnnnnnnnnnnnnnnnnnnnnnnnnnnnnnnnnnnnnnnnnnnnnnnnnnnnnnnnnnnnnnnnnnnnnnnnnnnnnnnnnnnnnnnnnnnnnnnnnnnnnnnnnnnnnnnnnnnnnnnnnnnnnnnnnnnnnnnnnnnnnnnnnnnnnnnnnnnnnnnnnnnnnnnnnnnnnnnnnnnnnnnnnnnncaaaaaaaaaaaaaaaaaaagcgaaaatatttgcaaaagtagcatacatgtacttccttcaggccacttaaaatacttatgcatgtctaaatattttatataagcatacctacacctaacttcttaaaaattgagtattctttttttgagacggctgtcgcccaggctagagtgcagtggcgcgatctcggctcactgcaagctccgcctcccgggttcacgccattctcctgcctcagcctcctgggtagctgggactacaggtgcccgccaccacgcctggctaattttttgtatttttagtggagacggggtttcaccgtgttagccaggatagtctcgatctcctgacctcgtgatctgcccgcctcagcctcccaaagtgctgggattataggtgtgagccactgcgcccggccgaaaattgagtattcttttaatggattttaagatataaaatctcaggctcagaaatttgagccacctaggggtgagaaattttggcctttgcccgcttcgaactgacttaactaaattaaatctatagaaagtaaaaaataaaggtctgtgaatgtacccagtactctcaggaagaagcatatttgccatgaagctaaaaaagcttcagtttcactccccttccaaggctctggggggtggggtgggggcgggagctagcaacgtgctcacatggtcatatatttttgtaaaacttatagaagatatttttgtattctttttcttaaagaagatatccaagattgtataagcttcagatcccagaaatcctagatttaaaaaaaataatcaaccaccaccccaacaaaattaggcacatgcctgaaaattctgctgctactgccagaattctgcgggtaggggcttcatccaaggtgttcctaataataggcagagtccccagattagttccggtgaggcttttgggaggggttatttggcgcggtgttggtgttggtaggatcctggctgtgaggctgaggcaggcctgaggagggctggggctgacaggtaggcagagttggctgggatgtgaggtgcaaggggtggtacttcggaaacaaactttgaagaggagaaggggcagcaagactgtgagtctggactttgtgatacactgtcacccctagtttagtgtgcctggttagggagaatcaagcagcatggaacccctcttcctttttcactaacatttttctgtatagtggttgaaacccagtgttaagagactgcatgacattggaaaagaaggggaggagaaaaagagtccatatga

SEQ ID NO: 233 - DNA, 49 bp, Homo sapiens
ggtcaggatatcgagaccatcctggctaaaatggtgaaaccccgtctct

SEQ ID NO: 234 - DNA, 118 bp, Homo sapiens
gctactcgggaggctgaggcaggagaatcgcttgaacccaggaggcagaggttgcagtgagccgagattgcaccactgcactccagcctgggcaacaagagtgagactctatctcaaa

SEQ ID NO: 235 - DNA, 842 bp, Homo sapiens
caagtcactgatgtttgtgtatgtctacgtgtatgtgtgcttgtgtgtgtgtttctgtatgtatgcatatttgtgtctgtgattgtgtgtgtttgtatgtgtgtgtgcgtgcgcatatatttagcttttcctcataaatctttattattaaaatgagctcacaacaaaagaggatgagaactcttgggctatgtaggaaatgcagggccagagggtgtattaggatcaagaagaggccagacccccaggtcgtggacctcctcctgccatgggcccacagcccatgtggttttgtgaggtcgcttgaaaacctggttaacctggaatgtaatttttaaacatgattgtactttgaggaaagaggctgttatttcttgttagagggatctggtcatcttttctgctctgttgtctttgtttatgctctcttgagagtcatggttccctctgcaccttgggcttggcccgctgcggggtagcccctgtttcccaagcatggtgggacccctgctgtgcctccacatctgtgttctccatctgctctggaatgccctccctgccaacgcacagagctctccagcctcggggaacttgctgctttggttgggaaattccccttgggattaagcgttcctgccttcccgcagcactttcctagctcagagcaggctcacagaccgtgtgagtgtccttgggtacagaataccacaggcaagtgagatcattctccattgcatttcttttcaactacaatttgagtgatttttcagaagtacaagatttacctgattcttacatggaggtagtgatgtattattaaatacacagaatacaaaggcaag

SEQ ID NO: 236 - DNA, 159 bp, Homo sapiens
ggctcactgcaagctccgcctcccgtgttcacgccattctcctgcctcagcctccggagtagctgggactacaggtgcccgccaccacgcccggctaattttttgtatttttagtagagacggggtttcaccatgttagccaggatggtctcgatctcc

SEQ ID NO: 237 - DNA, 160 bp, Homo sapiens
ggagatcgagactatcctggctaaaacagtgaaaccccgtctctactaaaaatacaaaaaattagcctggcgaggtggcgggcgcctgtagtcccagctacttgggaggctgagccaggagaatggcgtgaaccccagggggcggagcctgcagtgagcc

SEQ ID NO: 238 - DNA, 1470 bp, Homo sapiens
tgctgacccactccaacaccaaggattacatgtgcactgaatgtggctatgtcaccaagtggaagcactacctccgtgtgcacatgcgaaaacatgcaggggacctcaggtacaacacacacataggcctccgtcccaatcccaagaatcttagccaagctagcttcctctcggatctaacttctggccctatttctttctccggtccctggagagtctcctcctaaggccgggtgcaatggctcacacctgtaatcccagcactttgagaggccggggcgggcaaattgcttgagcttgggagttcaaggccatctgggcaacaccccatctctactaaaactacaaaaattagctgggcatggtagcagacgcctgtaatgccagcttcttgggaggctgaagcactagaatcgcttgagccggggggtggaggttgcaatgagccaagattgcaccactgtactccagcctgggtgacagagtaagactctgtttcaaaaaagaaaaggaaagaaaaaagagagtcttttcctaacacccttctctgttcccactgtctcaactccattgcctacagctggcctctgtgactgtggctcagtcacatagcgagcactctctgggctctgggaagggagtatagacctacagtataggcctagagactaaggtgtcacttgagttctcagagtttggccctgggaaagtggatagacactatattcatgccccaatcttgccacttccaaatccaggcaagttctctgacctatggcacagctggctaaggggtttctagacctgtcatgcctctgtgggagaagggaaatgaggcacagaaacctgccctgtggagttgtagccacgtcagttccttggaagtctacagtgggtcatgctgattcatgattactttcttttaggaaggcagtacagaatagggcttagaacacaggccctgaagctaggctgtctctgctcctggcttactttgtaaccaaccttaggcaaattattaacttctgtgatttagtttttctcacttggaaaatagagataccagtttcatagggtagtgaaaaggagggttacatcaggtgacacatgtatgatactgagtgcagagcctggcccacagtaagtatttactgactgattcttagttgttgtgattaattattgtgattgcctccccctttccctccttgccaggtatcagtgcaaccagtgctcctatcgctgtcaccgggctgatcagctgagcagccacaagctgcggcatcagggcaagtctctgatgtgtgaggtgtgtgccttcgcctgcaagcggaagtatgagctgcagaagcacatggcttcccagcaccaccctggcacaccggccccactctacccttgccactactgcagttaccagagccgccacaagcaggctgtgctgagccatgagaactgcaagcatacccg

SEQ ID NO: 239 - DNA, 264 bp, Homo sapiens
gagatggagtttcgctcttgttgcccaggctggagtgcaatggcatgatctccactcactgcaacctctgcctcccgggttcaagcgattctcctgcctcagcctcccgagtagctgggattacaggcatgtgccaccacgcccggctaattttgtatttttagtagacacggggtttctccatgttgttcaggctggtctcgaactcccaacctcaggtgatcctcccgcctcggcctcccaaagagctgggattacaggcgt

SEQ ID NO: 240 - DNA, 428 bp, Homo sapiens
cacaataatgcatcataaatatagcttttataatttattcctttatgatgaatgaatatttacaaatgatcataatgtgactggctgtgttgtagaatatgaggatacaattctcaaggaggcagcctgctgtcagagagcttacagtcaacttctgggagaaagaaaacacatttaaaacaaaaaaaattcatatggatgtgatggagagaatgtatgcgagcgagggcagggtatgaggcagttactttgggtaaatataatttatatcaaggtctaaaagatgagaagagaaaagctttatatgaagattagtgataaatgcttcaggaggaaagaaaggcaaatagaatacctctgactttgtaatgaatttgacaggcgtaaaagagagaggaatgtcataagaaagaagacgactaggaaag

SEQ ID NO: 241 - DNA, 328 bp, Homo sapiens
gagagacgatgtcgctctcagacaagcagacagcctctctcactgccgcgtacggtcagctcagtaagggcaagcctgcagagtgccgaatggactccccaaaagaaatcagtcaagccggattcgaatggcagaggacagagggcaaactgaatgaaattgggctgaatgtcagcatggacgggcaaccaaaagatgggcttgtgaagaatgccagcttcctggagcagaacaagctctgcttttttgaggggaagctagacaaagagctgagcattgaaatgcaggacaaggactgtcaagaagcctcaggtcaccttgagagcag

SEQ ID NO: 242 - DNA, 251 bp, Homo sapiens
ctcaaagtcaaattaattttttccccaccatgtcagtaaattgagggtgtatatgtgtgtgtcgtttgtggggggtgactagtttacacagaatggggttgttgaggcttacctgatttctaaggtattttccagagttttcctctggtatattcagactgtattacaacaatatcttcctcacccccttttttttttttttggacagggtttcctctcacccaggctggagtgcagtgatgtgatcacgg

SEQ ID NO: 243 - DNA, 5775 bp, Homo sapiens
gccacgcgatccactgggcttctgggcacagaagtgcctcaacaggcacaggcaggctccccacagccacaaggaaccctgctgccaaggaagcagctcctgttggggtcatcagatttttaatctggctcagcaaagccatggctgtccagccttaaaaaaatgggtgatgtgggagaaatggagggtgtgtgaagagcacagctgggcctcgagaactcagggccagccttcccagcttgggtcctgtttcggagcccaggccttgcttccccttagccgccccagccagattcttttgcgccccctgctggcacacacaaagacagacccaggagcgcacatgtgaacgtgcgcatgcttgctgccagttacccagttcatgaacacgtgaagccttgacttcaggttaagtaataaaaatttattgagaattcctgggttggtgtttatctcctcccagccttgagggagggaacaacactgtaggaaatcactgagaaatcacgcactgtccccaacagccccagttaacacagggaggaggaaagtaattccccagaaaaggggctagtcttcagtcttccttaatccaagaggggttcagggaaccggtgtgggggaccatcgcatgatactggggcggggtagggctgtgctggacccctggctggctcctcaaaaactggagaagcagatccacttcctctgggggtggagttcttggtgactaggctcatttcttacccttgatgaggctgtcactgtaggaaaaaaaagatagataatgacattattaggggacataaatgtgagaggcaggacactctaggccattccctctacgaccctcctaccctgattgagggtttgtcttcggggaggtgggaaagggggtagggtaggaggcgggtactggagaaggtggcctgcaggaccccacagaagcaacaacagcttaccttcccctgtggtgccagatcgccagatgaacaagaaacagagaagagaaatgcacatgttaattgacagcttcaggccccactcagctttgaaccctcctttgctcccaagagaaaagataaacagggttgacagccaggaatctcaggctcatgaaaggaggaggcatgttctcatggccactgctatttctcatctcctttcctaacatccctccattcaccagaggagtttgagggctcttgagtaagaaaactgagtatcatctttcatcactttttggttagatgaaaactttataattaaagtgctttttatgtgaataatcctatttgatctcataaaatcaatcctatgagatgcaagatagaaactgtcaaccacccccttttctaattttggttcaatgtctctgagccatatgaatagctgtagcaggctccagagcccaaacaaccagactcaggtcccacgttcttggtgataccccacagtgtggccacatctctcacctggtgaaactttcatcctgtaggttcagcacaaggttgtcagctgtgagatagatacgattctgtgatgtggcgatctacagggcaggaaataagacagatgcttgcattaagcaaagacctcaattccgacccctgcaattcagcagctacttaacatggaacacatgcagattagggcaggggtgcagcaatgagtaacacatggtttctgctcgcacttagggatccagagcgctgagcagcagctatgattagaacaaaaggtcagggaacccagaggaatcattcttgacaggaggagtatcggagaagccaattttttatttatttatttttgagacggagtcttgctctgttgctcaggctggagtgcagtggcatgatctcagctcactgcaacttccgcctcctgggttcaagtgattctcctgcctcagcctcctgcgtagctgggaatatagctaaacgccaccacagcgggctcattatcttttgtatttttagtagagatggggtttcaccatgttggccaggctggtctcgaactcctgacctcaggtgatccacccaccttggcctcccaaagtgcggggattacatgcgtgagccaccgcgccggccagagaagccaatctgagtagaaaccggaacaagcaaggttcgaattccctcacctcaatgtgccttaactgaaagcactttctcaaggcagccccatcagagacgctgggctgacacactcaccgtcttggagatattctgggctgctcgaatcttgcgaagtttgatgtagccagggttcttgctcagtgcttctccaaggtgaggagggttaaggtacacgcaagggcaggtctcaatccctggccctgtccttaccacactcccttgctccagtcctcctctgggctgtcagatccaaggttgcgctcaggtggcttgtgcccagccctaccgtggaccccacctgtgggcctccctgcaggctgctgccaggaactaggggcagcaccagaaatgaaggcaaggccaccaatgctattgatctggccttacagtggggagtcatggctcaggtactaccactaagatttcagatctcatctgtagtccccacccccaacaaggagccaagggccagagagcacggagtcgcattcgccttagtctcatcagcctgcccatgaaggagaatggggaactcaggtgccctaggggctgggctgagatctctccagcagaaggatatcatcttggcagcctcggcctcaccctcggcctgcacaattttctgccgctgttcctgctttgctttttctaccaagaattgggcccgctgggcctcctgctgggctgtggtgggagagagtcagggagaccctgtcctgggtcaggagccccacccatggagtctttcctcctcctgcatctcagaagccctcaccccacggctcttgcgactcacccacttgtttggcttctacagcagctgtgtactctcggctaaagctcagctctgtgatggccacatcatccaggatgaggctgaagtccttggccctctctgtcagctcccggcggatcaacagggatacctgagggcaggggtgaagaggggaagggaggggtggtttgaggggactggggagctgaaaggaaggttgcgacccctaacccttcactctcaatacaacatgcactgccttagcttcctgtcaggcaaacctgtaacataagcctctctgctcgaagaggtgcaggaaaagccaagacttggccattttcctctgtgcttcctaacaccgagtgctatcgagttctaatgctggctctccttatttcacagtggcaattagcacagcttttaggtggaaatggcactagggtgacaatgcttttctaataagctgcctttcctaattcccaatactctgggcctaggaaggaaaggctgacaccacgcagatggtggtgggagtcagacctgggcccgctgggtgatcagctgtgaggcattgaacttggccaccacactcttgagcacctcgttgacaatggacggcaacactcgttcctcgtagtccagccctaggcgctggtacatgctaggaagctcctgagcattgggtcgagacaacactcgcagggagatattcaccatctgtaggtctgagattgaggtcagcagtggctggtcaaggccaaacaccctttcccaagcattttctccttcatgttcctccctgtatgccctgtgcaatggtgtacagcctggcactaccctggggggaggagagttaatcaggctgacaaggaagacaagacgcagcacagctgaaatgcaccctcacccactgtgaagccttgaactgcaaaccccgtcaccagcagagctgactactctttccccctctgtactctgtgcaacctctaacgtgggcgctttcgtgctgtaccgtaatcatgtctcctgtaaggacttgggggacaagaattgtgtttaatgaatcttttattcccagggcccagtctagtaaatgaataagcgacctgcactaggtatagcacaaagaagtacattacaggttacaggtgagctacctgacccagggtgtatatgtgtgcgtgggtggggaggaggaagaggtctggggaactcaaaggcacggcttttatgtatggtctagaaggagagaacaggtgaactagtcaagcttagggacaaacttctccagaacagagtgtactagtggatgtaactgtagatatagtaagtcaagcagttagaaaaaaaaggctttaaaacaaagctttgatctaggcagtgaacaagacgagggacaaacaatactcttattgaatacacgtcagggaggagacagtaaaaagcacgcaaacacagtgtgttcagaatttgctgctttgaccccaggaggcaggtatttttgttacagctcttgcagatgtggaaagaggcctaaaggcctgacactaccatattcccctggggtttcttgccagctaccttgatcatcccacctgccatgtgattaccaagtgctcagacctacctttggagcctgtaggggaggagatttttcgaggtctggcccgaatgtcatagataatggggtactggaaccaagggatcctggagaggacagggataggtattaagaggccacagtttcggccgggcgcggtggctcacgcctgtaatcccagcactttgggaggccgaggcgggcggatcatttgaggtcaggagttcgagaccagcttgatctacatagtgaaaccccgtctctactaaaatacaaaaattagccgggcgtggtggcgggcgcctgtaatcccagctactcgtgaggctgaggcaggagaatcgcttgaaatcaggaggcggaggttgcagtgagccgagatcgcgccactgcactccagcctgggcgacagagcaagactccctctccaaaaaaaaaaaaagaaaaggccgcagtttcactagccttgcccggtttcccctcaccacgcgttttttggcctgctcctctccacgaccacagacaaggagagattctcttgtccctctggaaaacaacagtttgtatgctgctggaggttctcgcagcacccactatcctaggggcagggatgaggagggtgggaaaagagcagcgttgaatcctgttgcacgtccgactatagccactgctgggtcggcgtcaagggtgaaaggtcagggtcagcaggctctgcccgccattacctgaagtgaaggccctcggccaggatagtgtcctgctgcactccaccgatccgattgaagaagatggctctgtgcccgccttccactgtggggagatgggtggtgatcaggccaggccgctgctcagaggaaatgctaggcccgtggaggggcgcggggacagggcaaggggtttgggggagggactggaagcgtccggcgagcaggcggaggttgctcaccggtgaacacagattcgcgcacaccgtaggccacggcgccggcccccagcaacagcttcagggccgtgcccatgccccggggcccggcgggcagccgtcccgccaagtccttcaagttctgggccatgtctgatcttgaggccggcggcactggaggtcagaagggggtgccggcccgcctctaccccgctccggcttaggtactgcacccttcacacgagggttcgggcccgtaaggctggcgaaagaaagggcagcggaagtgcgctccctttgaaaccctcccccttagcccactacggacccg

SEQ ID NO: 244 - DNA, 328 bp, Homo sapiens; identical to SEQ ID NO: 241

SEQ ID NO: 245 - DNA, 738 bp, Homo sapiens
ccaaataccattattgattgattgattgactgactgagacaaggcctcactcctgttgcccaggctggtgcagtgatgtgatcatggctcactgcagccttgacttctggggctctggtgcatcctctcacttcagtcccctgagtagctgggactacagacacatgctaccatgcccagctaatgcaaatatcatttttaaaaggcgactgaactggacgcctcatatgagctcccatggctgcccagacatgctttcatgtcagtgattatataattttttttgtaaattagcttatgcaaataatcttgtggaccctaacttatacatgcttctgcaaagaaacatgtttaacgataaagttatactggaattcaaaacatgatgttttatggaatgtaagacattggggtatagataaaaagtggttggaaaaaatatatatatttatttttagagatgaggtctccttctgtcatctaggttggaatgcagtggcatcatcatagttcactgcagtctcaaattcctgggctcaaatgatcctcccaccttggtctcctgaatagctgggactacaggtgcatgccatcatgcctggctaattaaaaacaaaatttatttatttatttttgagacagaatcttgctcttttgcccatgctggagtgtagaggtatgatcttggctcaatgcagcctcaacgtcctgagttgagcggaggaccccgggctccag

SEQ ID NO: 246 - DNA, 4962 bp, Homo sapiens
gactggacacaattccgaagagctgcccagaaggagagaacaatgtcatcactacccgtgagttgaaaagtcacagccttcaataatctcaagtcacataaaccaagaaagaaacaggggaggttttctgagttgaaaatatgagcattcctactgtgaatgcattaccgagagttgtgggtgtgtagaagagaaaccctgaggctgtggtatctgagatgattgtgggtgtaggctgtggaccctggaccagtgtaaccctctgtgagggtgtggtggtgtctgatgagagtgaactctgctgagattaagtgactttaggtgggaggtggatgacccaccaggaccggcaagtgtgtgagtgagtgtaagggggtgagtgtgctttgtcttcctgtctgtgatgtgagtgtgtgtgggcacagccagaccagtgcatggtcatctttatgtgcacagtgagcaggtgtgtgtaactcagtgagtggcatggctctgtgtgactatgggtgtgtgtgctgggatgtgactgggtattgaagggaaaacatgcacgtggccttctgtgcatgtgaaggttcctccccacacagcagcacctctgatgaagcacctgtgtgtcttttcatgtgtggcaatgtggatcccaagtggcttaactggtggggatcttggggattgtgagttaccaaggactcgtttcagatcacttatgagagcgaaatatatcatcagtagatatctcttcccagtaagagtgaggaaaaggaacgcagattatgggagagatggttcctcaggtggggactgcacagagtgatcactggcttttgcctcccaggctcagcttccctgtcgctagcccagcctgttcttcccattgtggaacaggcgagtgtgaagatactgatttgccagggaagaatattagaggccgtggttaaagagacggaatcaaacaaaatatccactgtaagctctgtctgaactgagactaaacttgttcctccactcatgaaagaacaagctgtctgaattcagacagtgcttactgtggacattactcaacaaagcagctgggttcactggttcatgactataatcccaccaatttgggaggcaaagatgggagggtaacttgaggccagaaatttgagaccggtctaggcatcatagtgatatgctttctttaaaaatctttaaatatctgactggcagagtggcagacacctttcaccccagctacacaagagggggcagatgtgtgaggatcactgcagtccaggagttcgatgtttcagtgagctgtgattgcaccactgcatatcagcctgggtgacagagcaagaccctatctcaaaaatacagaaaaatcatcaaccacttgcagtcgtcgtagaaatcaatcattccctccagttatgtccctgacccacaggcttcatttgtgcaagtactggggctgtgctgtcagtaatgtgtgccgcttctgggaaggacgtccattgcccttgatgattgtggtgcgtgtacatcccacacacaggggtttcctgttctttcgtcatttccctttctctttcaacaagtgttgtttctcactggagtgaatttttaaattctttcaccctcaagtcttgttttcattttctgagttgaaaataaggcaggtcagtgtttcaggaggactcccctgttctgttaggtcacccctaattgaccctatacatgccagggattagggtaaaagttttacctatattaactcctctattactgagaacaccctacaaagtaggaattcctgatagtcctccttgtcctggggaaactgaggcagggagaggttaagtaatagatctaagattgcactgctagtataaggcaaaatgaggactggaatccaggcatccgggctcttgaacaattgctcttacctatggatccaccatatcttcaggaatatggggccctgactgtggtagggtgaaaggggagaggcctcagagtctgacctttgatctctaacctcctgcaccatgggaatctgttacataggggaggttacaccttaccctttagctctcactcactctccataccctggcaggtaccatacacactgcctgtttccttgcctgttggttcgtgcgtgataatcacagggacaccgatcctcacttttgtgtgagtactccatggtccaatggagggggtggaggagagaagggagaatatttgctaagggtttaaccttatgtgtgagtgatgtggaaaactctagttggcataatgaaggcctcatgcaagtgcaggccctggagaccttccagcaacagacatgagacctgtagaaactgcatgcaggccagccacggaacctaggggaggagaacactcagtgggtttgggttgtggctctttattaaagggcatagaattttcaggaaatgaacaagtcataggcccatgtcactgactggcgctcagtttttgtctggggatgaggaacacagcatctccctgcctgggggcatgaggagctaaagcgtccccacagggaccaggactgcagtatcatcggggagactttttgccctgggtaaaggggggaagggatttgtgtgtgtggcgagtgtgtgtctgcacaatggggggacctgcccaacatgctgtgtgctttgacctcagcaaggacccacagctggaggtgaatttctacactgggatggatgaggactcagatattgctttccaattccgactgcactttggtcatcctgcaatcatgaacagttgtgtgtttggcatatggagatatgaggagaaatgctactatttaccctttgaagatggcaaaccatttgagctgtgcatctatgtgcgtcacaaggaatacaaggtgagtacttcaggatcttccagcgctggagctctgtgggctcttagagcaggaggcagctttcattgacctggtgccaccagtcccttggggcccatcttccataactattcctgtttcaggttttcatcacagagcaccctctgcttgcactgccatcctcagctctttcccaaatctgaccaagatcaaggtcggctcacctgccatttcctccaaagtggagaatctcctctgtcttttcccatagtgctcatttctacttatgccatttttaaaattttcatttagctgaatgtatactatatacttaagaaaaaggtggttttaatcattcaaaaattatgtttcaattttgggcccaattctactcataagaacaccattactagagttctgctcttcttcagaaagaaactttttatttttttatttttttgagacagagtctcactttgtcatccaggttggagtgcagtggcgtgatcacagctcattgcaaactccaccacccagattcaagcaattctcttgccttagtctcccaagtagccggaattacaggtgcatgccatcacaccttgttaacttttgtatttttagtagaagaagagtttcaccatgttggccaggcttgtcttcaactcccgaccttgtgtgatttgctcaccttggcctcccaaaatactgggattacaggcataagccaccgtgcccagcctttcagaggaaatcttttcctatggaagcatgtagatatgtctatgattgcatttgtttttaagcaaatcctggtgtaagttgctctacacattacactttagcaactaagttgatttgttgtcaaagaatatatcttgaagacattatcaatccacggtgccgcttcagtttttaaagattacataatattgcattaaaaagtttacccaaaattattgaacttgacccttttttgggcattaaagttgtttccagtattttgctctcacaaatgatgccgtattaagttttatagtcaatcctcttgtcattactaatttcccaatacttatactggaagataattagaaaaaaatgaaaaaaacagctcaaaaatgtgtaaattttaaatttgaaaaattaacactaagaaggtgactttctctatagcctcgacataaggaatatatccatagtttccattctttttggctttctctaatgagtaggccaaaagattcacatcttattcagattcaagtgagggatcttttcctaggcttaaaagttgttgaagataatatcctatgttttacaagacctgtcctcctttaactctctaagaaccctgggtttcattctttgccactaacacctcagatgtaggctactccaaagaggaactgtgccatcagtagtgaaaggcagtcacagttcatggaactgaaaagtatgcattcaatgaacatggcctcgcactaaccctctggcaggtcctgtgcgagatgcagggtctcaagttcctgagacaccgtccctggtgatggggatcttccaggttggaagggaggccgagtaaacggactgtgtgacacggtgtataacttcactaggggaatgagagaaaacattagaaataaaatgagcatctgtctcaaataggcacgaaacatagcctgtaaaatcacagaagtgtgtctactaggttcacttgtgtaactaggagttttcatggggaaggttatttgtaactgggcagagaagagaaagggctgaaaacctgtttggtggcatgctgtctttctgatgcatttttcctcttgtaggtaatggtaaatggccaacgcatttacaactttgcccatcgattcccgccagcatctgtgaagatgctgcaagtcttcagagatatctccctgaccagagtgcttatcagcgattgagggagatgatcagactcctcattgttgaggaatccctctttctacctgaccatgggattcccagagcctactaacagaataatccctcctcaccccttcccctacacttgatcattaaaacagcaccaaacttca

SEQ ID NO: 247 - DNA, 8788 bp, Homo sapiens
ggaagctgcggacaggggctgtgaggtggcagcggctgcagcggcggagccggcgcctcagcgggcactggggtctgttcccccttccccgtccctgctccctgccaggcgcgtgcgggacgccgctcttggtccccacgcctccgccccgccccctcccgggacgccgggagaccccggccgtcctttatccggtgtccgccggcccccggccctgaaacccgggcctcctccccgagggccttgggcgtccctcctggtcctgcgctcgcggcctcgatgctgtctctggcgcggcctccgctcccgccgactggcctgagaacgaggtctgtgccccagtctcccagccgcgacctccgaccccgcctcgcagaacgacccgagctggtctcccgagcccccttctcagcagcccggtgacgtggccagtttatttctgttttgagacgaacggcgaagactcgcgtcgggtcttcgttctagggctagacttggtctctgatcgccgagaggtagcgcaggggctgtgggcccccggcaggggtcctgtcggaagctggccgcgcttctgtttgcgttcccaggaccctggcattgtctctagttgctgcttgtgctctctctttgcttttggtttgcttcatttggcccctggggccctggtaaaaccaggcaccgaatcgctcgcacacagagttccagtccccgcctgctgtctcctcagcagctggggttccgaggagaatgccctgcaagatggctccatcggccatggcgctcctgagaggctgtcagtgctgagtcaccgatctacctcattcgggtgggcagaacttatgtgtgccatgcgagtggctccagaccgctcctgagtgggaggaggggttcctgtagccgttgcgtcttctcaaacacggggagcagagtagaaagaggctctggccccttcccttgtgcccaccgggcctgccgcagtggctcagcagccccttcagtagcccgcctgaggaccgatgccagaggcaggcattcttccggaaaggcccactgaggcaggctccggctcctctggttggggctgttgttttgatggatcgtgtgcttttcccttacctcttatcacttgctgtcatctgttgacttaggcccagtctgcagatgtgtgtagtgttcctttttgggttagctttggcagtattgagttttacttcctcctctttttagtggaagacagaccataatcccagtgtgagtgaaattgattgtttcatttattaccgttttggctgggggttagttccgacaccttcacagttgaagagcaggcagaaggagttgtgaagacaggacaatcttcttggggatgctggtcctggaagccagcgggcctcgctctgtctttggcctcattgaccccaggttctctggttaaaactgaaagcctactactggcctggtgcccatcaatccattgatccttgaggctgtgcccctggggcacccacctggcagggcctaccaccatgcgactgagctccctgttggctctgctgcggccagcgcttcccctcatcttagggctgtctctggggtgcagcctgagcctcctgcgggtttcctggatccagggggagggagaagatccctgtgtcgaggctgtaggggagcgaggagggccacagaatccagattccagagctcggctagaccaaagtgatgaagacttcaaaccccggattgtcccctactacagggaccccaacaagccctacaagaaggtgctcaggtgagagcaacatgtgtgcatagtccccagacactggccctgttttgggctggtgtaaatccttgcctctgcctttccattggcaatcggcgtcgggcgacttggagcaattctggcttattttccatcatggtttctttctgttttttccctccttctcaggtcttagaaagtctcacattcattggtgttaaattagggttcgatgttttttgtttgtttttgttttgttttgagacggagtcttgctctcgtcgcccaggctggagtgcaatggtgcgatattggctcactgcaatctctgcctcccaggttcaagtgattttcctgcctcagccttgcgagtagctggtattacaggtgcacaccaccacgcccagctaattttgtatttttagtagacatgaggtttcttcatgttggtcaggctggtcttgaactcctgacctcaggtgatccacctgcctcggcctcccaaagtgctgggattacaggcgtgagctaccgtgcccagccagggttcgatgttcttgaacagaggaggaattgcatctaacctacctaatctatccttggtagactccctcccctcccaaatcaattcgtgtcagctacttagtggatactcagttcagtacctaattaatattgacaaggaaggaagtttctcccttctcagccccaactcactcctagagggggatgtatattctgaacaagctgggttcctaaagattagggagttgacctctggcacactggtctttccacaggactcggtacatccagacagagctgggctcccgtgagcggttgctggtggctgtcctgacctcccgagctacactgtccactttggccgtggctgtgaaccgtacggtggcccatcacttccctcggttactctacttcactgggcagcggggggcccgggctccagcagggatgcaggtggtgtctcatggggatgagcggcccgcctggctcatgtcagagaccctgcgccaccttcacacacactttggggccgactacgactggttcttcatcatgcaggatgacacatatgtgcaggccccccgcctggcagcccttgctggccacctcagcatcaaccaagacctgtacttaggccgggcagaggagttcattggcgcaggcgagcaggcccggtactgtcatgggggctttggctacctgttgtcacggagtctcctgcttcgtctgcggccacatctggatggctgccgaggagacattctcagtgcccgtcctgacgagtggcttggacgctgcctcattgactctctgggcgtcggctgtgtctcacagcaccaggtgacagctctttcaagtcagtcccagtccctgataagctagtgggggatgagtgattggccttcctcccagcagcaccttagaggccattgttcccccttcctggccactggccgctctgtgggccctccgttgctcacctttggcaatctgagaacctggggctatcaaaagtagtatcttgttaggaacccctaagcaagaccaaagggtgctcctactcagcagtccttctcccctgcccccctgccctccacacctcccccgacatccacacttcagttatggcagtgtgggcatgtcttagagatggctagtctccagagaagtgaggtgatcacttttccagcccagagagctgccctgtttcttgtgctggagaagagtggaagaacccagaggtggctcatcctctcaaaccaaagtattgggaggattttctggcttgtgtcattcattcccttgaagaacaatgggaatctttgggggaagaaagtatcattattattatttttaatatgttatttctgtgatggctccttgcagagcagggctagcctgtaagcaatgcactgagagtagccgagagtgtccttagttgcctacttgctttctactttccaaaatgtgggcagtgaaagaactggggttaagcgaggtgctggaaagggtgcctcttctgtcctctgttctaacgcagcagtgctaacagatgtgaacactgagtatggttaagggcggtttgggactggcagctcttgtgtgtgtcattgattggtctgattgtccctctaggggcagcagtatcgctcatttgaactggccaaaaatagggaccctgagaaggaagggagctcggctttcctgagtgccttcgccgtgcaccctgtctccgaaggtaccctcatgtaccggctccacaaacgcttcagcgctctggagttggagcgggcttacagtgaaatagaacaactgcaggtgagctgaagaggagcaggtgggcagaggaccgcagtcagagggtcagagagagcctgagatgtccaggcgtgcaatgaacgagcagctggcagtggggctgggctaggccctgtataatggcagggcaggaagaggccgaccatacttaaatttaaagcaactacagggacaaaggtctttgggggtccaaagcaatcataaggtaagctcccagcacaacttgaatgcagctaaaggggtttgcaagtagactctgaggatcaggaagctccgcacagtgttcagacagaatagttttagctcctcctcaatagtgcctgtccactgaggaggcaaaaactctgaagtttctttacttctagaactgtcccaagaaagcccaagggtagaagggagaattctcaagttgaacgtcaggcttggcagaggtggagtgtagatgaaaacaaaggtgtgattatgaagaggatgtgagtcctttgggtgtaggagagaaaggctgttgagcttctatttcaagatacttttacctgtgcaaaaagcacattttccacctccttctcatggcatttgtgtaaggtgagtatgattcctattccatctgcattttagaggtgaagaataacgtacaagggattcagtgattagcaagggacccctcactaagtgttgatggagttaggacagagctcagctgtttgaatctcagagcccaggcagctggagctgggtaggatcctggagctggcactaatgtgaggtgcattccctccaacccaggctcagatccggaacctgaccgtgctgacccccgaaggggaggcagggctgagctggcccgttgggctccctgctcctttcacaccacactctcgctttgaggtgctgggctgggactacttcacagagcagcacaccttctcctgtgcagatggggctcccaagtgcccactacagggggctagcagggcggacgtgggtgatgcgttggagactgccctggagcagctcaatcggcgctatcagccccgcctgcgcttccagaagcagcgactgctcaacggctatcggcgcttcgacccagcacggggcatggagtacaccctggacctgctgttggaatgtgtgacacagcgtgggcaccggcgggccctggctcgcagggtcagcctgctgcggccactgagccgggtggaaatcctacctatgccctatgtcactgaggccacccgagtgcagctggtgctgccactcctggtggctgaagctgctgcagccccggctttcctcgaggcctttgcagccaatgtcctggagccacgagaacatgcattgctcaccctgttgctggtctacgggccacgagaaggtggccgtggagctccagacccatttcttggggtgaaggctgcagcagcggagttagagcgacggtaccctgggacgaggctggcctggctcgctgtgcgagcagaggccccttcccaggtgcgactcatggacgtggtctcgaagaagcaccctgtggacactctcttcttccttaccaccgtgtggacaaggcctgggcccgaagtcctcaaccgctgtcgcatgaatgccatctctggctggcaggccttctttccagtccatttccaggagttcaatcctgccctgtcaccacagagatcacccccagggcccccgggggctggccctgaccccccctcccctcctggtgctgacccctcccggggggctcctataggggggagatttgaccggcaggcttctgcggagggctgcttctacaacgctgactacctggcggcccgagcccggctggcaggtgaactggcaggccaggaagaggaggaagccctggaggggctggaggtgatggatgttttcctccggttctcagggctccacctctttcgggccgtagagccagggctggtgcagaagttctccctgcgagactgcagcccacggctcagtgaagaactctaccaccgctgccgcctcagcaacctggaggggctagggggccgtgcccagctggctatggctctctttgagcaggagcaggccaatagcacttagcccgcctgggggccctaacctcattacctttcctttgtctgcctcagccccaggaagggcaaggcaagatggtggacagatagagaattgttgctgtattttttaaatatgaaaatgttattaaacatgtcttctgccaaactgtttttaggtctagggaaaattgagtaaggagaagaatccaagggaagggaatggggagtcgtcccgagggacccactgcctccccaccttcttcccttccccttctctccccctcccctccccagtttccaatgaccacacggctgctgtcagatgaatgacttttaatccagccccacaccccaaggtggcagaggagtgatgctggagcccggggcaaaatgctggggcccgggacacggctgaaagttccgtcgtgctgcttatttttgggctcctaggtgttgcgcacaaccagcgactgctccagctcctgcctgcgctgctggatctttagaggaagtgagaacaggagcaggtgtcagtgttctggtgagtgatcaggacaatcccacctactgacaccgcctgccctgaaagagcatctgggagcagggagggccattgcatggtgaggcagcgtggtgaagctttactgtggggagctgcgagggctgcccacaagctgaacagggaggtttctcttggagttgaggatggggaagcctcagggcaagggtccctgcataccttgcagtagaagtagcgactgacggcctcctgggaccagggctggtggtagaactcagcccggcgctcctcttcagggttgccggctacatctgtcatcacctgggagggagcgtggggtgagccctgagccctgaatcccctcacctgcccctggagtacaacgtttactctctttcccgctgtgcttgtcttccactccagtactccctgagtctccctcttcaccttgaggtcccggctctgggagcggagcaggtcttggacatagcctttggggtctctggagaagcttagcatgaagtccctctggatcttgagctggtttatggactcaatcgtctcatggatctgcaggtagaaagatagatgctttccacctggctttggtgatgtgggagacgaggggaaaggaagcgggtgggaaggggagggagagggggtttcttctgtgaaggacaacccctcagagcccctgatttctctgaagtcccaggggaggaggggatgggcagaactaaacttggaatgaggttcagctccaagcagcatggacgggccatgtgtgtcccattggcccagagtctggtctcttttttttttttttttttaatttaacccagactgctcatctgcaaccacaccctggtctcagaaaagtctcctctatcatctctgggttaatgtcccactccagctctgggcttgggccccaccttactgtccagagcactgatctcctgctggttggccgtggataggaggaagctgctcatctgcccctttaatggctcctccacctccacgtcaatgtcatagcacgccgtcttcttctggtctgaagggtccacgctgccagggaagtccagcccttcgtgtccacgatgcccccatacggccccagggccccggggctggggcagatccaacagggagggagaagagatgggagtgggaggagagggaggggcagggaaggcaggaacgagatcattccctggtctgagaagcaagctggggccacctcacctgatgacatggttgatgacaattgggtcagggggcaatagcagggctgtgaggcgctggggaatctcagaaaacttcagccggggacaatcaaaaatctgaagcaggacaattggggagagagagatcactcttcttgaagagatcatcatgcagttgtagatccttttgttctagaaaggccacaagaagctgagaggaagtctgattcctcagtgcgcatggggatgggattggggtgggctggtctggtggtggagccaccggtatggctgacaagatagggggtgggtcagtgtggggcaggggttgagagtgcgggccctgggtcagcctgcttatgtatcagtcctgcctctgccacttactatgcaacctggagcaagttaacacctcagggctcagtgtcttcatctctagagtggggatgaaaagaatacctatctcccagggctgccgtgagaagtcagtgaactaatacacataaagtgcttgggacagtgcctggcacatggtaagtgcccaataaatatcaactgctatttttactcctcaggtttatctgctgtatttatttttaaatgcattaataagaatattctctgttttggtggaattttgctcaatcacttttgcagcaatttgattttcctaactgcccaggagagtagataggacaggtattgtcactccacttcaaagataaggaaacaaggttcagaatcgctgagtcacttacccagagtccagactcaggactagaacctggggatcctaactccaagtgccaagaatattacattccagaaagcggttggctttgtagggtttccaggtcttcctaacttg

SEQ ID NO: 248 - DNA, 5197 bp, Homo sapiens
agcaaaacgaccactgaaaacaacgccggtgagtcagccagttttcttttgaatcttgtgggggaagcagcccagctattcgggaggctgaggcaggagaatggcacgaaccccgggggcagagctggcagtgagccgagatcacgccactgcacgccagcctgggcgacagagcgagactccgtctcaaaaaaaagagaaaacctaagaggttcaggtgatatggttcaaaaaaggacaagatttacaaagtattaagggacggaaataggaagaagagaaatttcgaagagaaaagaaaagaaaaggatgtttggttatagagatacgggaaggagactcaaggaattttttttttaaagggaaaaaagttaataaacttcataatataaaaatcaattatttcaggactgagtctaactcagactgctgtggaattggcagcgtaagcctacttgtgtgataatgatgaaaccaagtgttaatgtcactgttacctttttttcatatttctgatctttttatgtgtatcaggtggcaaaatatccaaagaaagggtcccaagcggtacatcgtcatagccggaaacagtcagagccaccagccaatgatcttttcaatgctgcgaaagctgccaaaagtgacatgcaggtaaaagcagtgtcttacctctgttgataccatctcactttttgtaaggtggtaaggacaagtgtctacaaacttgatttgatgtgaacattttagtgagtgtaacatatcaagaaagataagattatggggtgaatccttggagtgatagaagggtaaccttgaataagagagcatgttcttttttttttttttttttttttgagacagtctctttctgttgcccaggctggagtgcagtggcacagtctcagctcactgcagcctctgcctcctgggttcaagcgattctcatggtcttgggaggctgaggcctcccaagtagctgggcttacaggcatgtgccaccatgcctagctaatttttgtatttttagtagagatggggtttcgccatgtcggccaggctggtctccaactcctgacctcaggtgatccgcctgcctcggcctcccaaagtgctgggattacaggtgtgagccaccgcactcggcttcgagagagcgtttcttttcttaaagcgtgttcttttcttaaaggtatcacaggagtgattatgcctttattgattgatggagcagatgaggagaggcattgcatgacatgggaaggaagcttagatgtgggtggcaccttgttcacccgtgttattttttagctccatcttgacaattatacttaattattttttccctctctgtttctttttttataattttattgaagttctaatatctgaaagtgtacaaagcgtatatgtagtttaaaaaataaaaatgagatatcacccagatctctagccccagctcaagaaatgaaacattaatagtgctgtagagatcctttgtgtaccttctttctaccctacctcacagtccccttattacccataggtaaacactagggtgaactttgtgttaatctttctcatctttcattatagtgttaccactatgaatgtgttctttaattatgtaaatgaatccattattcaggcttctgtgatttaattatttcagttaagattgtttgagatttatccacattaacatgtagttttatagtttctgggaaaatatttaaaattttcaaacatacagaattttgctagttatattttcgttatttgatttctaactttattgtgttgtagtcagggaatgtggtgtttgaaatttatgtaggggctgggcacagtggctcacatctgtgatcccagcacttggggaggctgaggcaggcagatcacttgaggccaggagttcgagaccagcctggccaacatggcgaaaccccatctctactaaaaatacacaaattagctgcatgtggtggcatttgtctgtaatcccagccacttgggaggctgaggcatgagaattgcttgaacccaggaggtggaggttgcagtgagctgagattgtgccacggcactccagcctgggtgacagagtgatactctgtctcaaaaaaaaaaaaaaaaaaaaaaagacatttatggagacttagccttatggcctagtattgagttggtacaatcattttatcttttctgtttctttttccccctttgcttgctttcctctggatttcttatcttctacaaggacctgagcacattttaattccagttgtcttttccaccttacatgcagttgtacagtgtgttagttttttatttgaaacggagtcttgctctgtcaccaggctggagtgcagtgacgcgatcttggctcactgcacctccgcctcccgggttcaggcgattctcctgcctcagcctgccaagtagctgggactacaggcacccgccaccatgcttggctaatttttggccaccatgcccagcctgaatgaactttcaaaattggtttttaaaagaggtatggaggccgggtgcagtggctcacacctgtaactccagcactttgggaggccaagacgggcagatcacttgaggtcagaagttcgagaccagcctggccaacatggtgaaaccccatctctactaaaaatacaaaaaggtagctgggcgtggtggtgcacctgtaatcccagctactcaggaggctgaagcaggagaatcacttgaacccgagaggtagaggttgcagtgagctgagattgtgccgctgcactccagcctgggcaacaggtggagtggagaattaggctgtacaaggctggtgtttaactattttatggtttggtaacagaaagaaaatatttactaactgggtatggcacatttttgtagtcctagctacttgagaggccaaagtgggaagatgacttgaacccaggagttcaaggccagcttgggcaacacagcaagagaccccatcccttaaaaaaaagagaaaaaatatttacatgtattttactatatatatagtatttacatcgggaggaagaaatgaaaggcatggggtacatggcatttcaagaaaataaattcttccatgagagggagttaactggtaggatggaaagtgagtttggagagagggtggctctaagagtcaacttatctgtctgtgtctagggatgtccttcctgagatccgtgctatctgcattgaggaaattgggtgttggatgcaaagctacagcacgtctttcctcaccgacagctatttaaaatatattggttggactctgcatgataaggtgggattcgagtcagtttccctttccgtttccttcatctttttcctgtcctaggacacttcaccttttcctgggcctgccactgagatattttacctagtgaccaatgattaacccatcaaggcgctgaaccttgaaactccgctagcactggggagggtaggataaggtagagagagacatacccaggagatgaaatgactcaaaacatgaggtacggggagagagactttacaatggaagacagttattgatggatggtaatgcaggtgctaaggggcagccaaaggatccttctcatcatgagtactgctgtgatccttttttttttttaagtatgaagacagctgttcattgtttctgacatctcagagtcctcagtagaggggacacccaagctagaatgagggatcggagaggggagtctggacgctcagtaggggcgagtagagtgtggttggtcttatttccattctcttggttttccctcctcaccagcaccgagaagtccgcgtgaagtgcgtgaaggctctgaaagggctgtacggtaaccgggacctgaccgcacgcctggagctcttcactggccgcttcaaggtgagacgggtggtgctccttggcttggctctttgtcgtggttcccgtttccccaccttgtatctttctacccttcatgctctaagatgtcttggctatcccagcatctgcctctacgtaggcactctctttaggaggctctgattctaagagaacagaatatttggaatgggcgtaatgagatattgagtgactttctcctttctgcaggactggatggtttccatgatcatggacagagagtacagtgtggcagtggaggccgtcagattactgatacttatccttaagtgagtcctgggaagaggggaggccagtgtctcagacctttgcccttccagggtcatctccctccacctgtcacagctgactcttccatctgtgcaggttgactgaggtcattcctgagttgcagtatgttgagagggtaatatttctgtcttctctaactccccatactcccttgtcttccactctccatttaggagttttttgtgagttatgtccttgttgcttttgcctctttttctttctagccttgattgtgccagaagacaatgtccctattcacacactctttctgcttttctgtgggcaggaacatggaaggggtgctgatggacgtggactgtgagagcgtctaccccattgtgtaggcctctaattgaggcctggcctctgctgtgggtgaatttctgtactggaagtgagtggggctccttttacgtttctttaacaccaccctctcggtttctctcccacatgtgctgctgccctacttaaggcctccccatctccgtggaagtctctctgctgtctcttttcctctctcagctccttggggctttccttagctctgcacctccttttcctttatcatctccttgggccatctcctccctctgtggtcatcattacacctccttgtttcctcctgtgctgagccctttccttgtgtccattccaccagacttttctaccctgagtgcgagataagaacgatgggtggaagagagcaacgccagagcccaggtgcccagaggactttcttccagcttctgctgtccttctttgtggagagcaaggtgacatacacagagataactctggctgttgtgcataggacctacaagtgggctggggttggtggttcacgcctgtaagcccaacactttgggaggctgaggtgggaggatcctttgagcccaggagtttgagaccagcttgggcaacatagtgagaccctgtctctaccaaaaaaaaaaaaaaaaaaaaaagaca

SEQ ID NO: 249 - DNA, 14426 bp, Homo sapiens
agcagggtcagaagggaggtggtcgccctccgtcgtggtctggcgtgtattccgagccttggtgtctggcggtttccgagcgttggtgtctggcggtttccgagcgttggtgtctggcggtttccgaccgttggtgtctggcggtttccgaccgttggtgtctggcacgcgccaccctctcttgctttggttgcgccatgccgatgtaccaggtaaagccctatcaccgggtctgcgcccctctccgtgtggagcccacctgcatgtactggctccccaacatgcacggcaggagcggcggcccagcacttggcactggccacttgcaggtaggagcgcggggcaccccgcccactgcgcacgcgcggcggccgggtgctggcccgggtgcccctaggccggatagagtgcttcccaaccgattcgcggccccaccccggcatctgtgccggccggccaggggctcacccagatttttatgttttaaaagatttattcaggccgggcgccgtggctcacgcctgtaatcccggcactttgggaggccgaggcgggcggatcacctgagatcaggagttcgagaccagtctggccaacatggtgaaaccccgtgtctactaaaaatgcaaaaattagccgggcgtgtgtcgggcgcctgtaatcgcagctactcgggaggctgaggcaggagaatggtttgaaccctggaggcggagcttgcagtgagctgagatcgagccattgcactcgagcctgggcagcaagagtgaaactccgtctcaaaaaaaaaaattattatatacatatatatctttatatatattaaatatacctttattatgcgtattatacatattgtatattatgtgtaatatatgacataatatattataaaatatattgtatattatatatatatatatttttttcctggtcgagcgcggtggttcacgcctggaatctcagcgctttgggagaccgaagcgggaggattgcttgagcccggagagtttgagaccaccctgagcaacatagcaagacccttgtctctatgttttttttttttttttgagttggagtcttgctctgtcgcccaggctggaatgcagtggcctgatctcgactcactgcaagctccacctcccgggttcacgccattctcctgcctcagcctccccagtagctgggactacaggcgcccgccaccacgcctggctaactttattttgtatttttagtagagacttggtttcaccgtgttagccaggatggtctcgatctcttgacctcgtgattcgcctgcctcggcctcccaaattgctgggattacaggcgtgagccaccacgcccagctgccttgtctctattttttaaatgttttaattaaaataaaaatctatccatattttttcttttttttttgcgtatggctgcttaaacattttagttcagaattctatcctctgaaaagtgaatagcacataaatgctcattttgaggaattacaaagcgaaccccagggtcaccacctcccaggttgacacacattgtcaccgctccattctttccacttaaaccttccccaccagcaccccagggcctgatttttatggtaattatgtcatgcttgtctctattattttgtcagctaagtatccctaaacaatatggtctggttttttgtttgtttgtttgttttgtttttttcagacggagtttcactctgtcacccaggctggagtgcagtggcatgatctcagctcactgccaccttggcctcctgggttcaagcaattctcaggcctcagcctcatgagtagctgagattacaggcactgtccactgcacctggctaatttttgtatttttagtagagacggggttttgccatgttgaccaggctggtcttgaactcctgacctcaggcgatccgcccgccttgaactcccaaagtgctggattacaggtgtgagccactgtgcccggcacctaaacaacatagttttgatataggtaagcatacagcatatattttgatgtatttcaggtaatttagtctaagaacaggaaaggacagaaaatgaacacaatttgtagttctttgttcttaacaaactaagaatactttgcttaaataagtagcaatgagaatgtaactcagtaattcatacaaatagacaagaagacaagaaaatgatttgaggacagcttcaatcgcggtgtgaagaagaaagcagcaaaacgaccactgaaaacaacgccggtgagtcagccagttttcttttgtttttgaatcttgtgggggaagcagcccagctattcgggaggctgaggcaggagaatggcacgaaccccgggggcagagctggcagtgagccgagatcacgccactgcacgccagcctgggcgacagagcgagactccgtctcaaaaaaaagagaaaacctaagaggttcaggtgatatggttcaaaaaaggacaagatttacaaagtattaagggacggaaataggaagaagagaaatttcgaagagaaaagaaaagaaaaggatgtttggttatagagatacgggaaggagactcaaggaattttttttttaaagggaaaaaagttaataaacttcataatacaaaaatcaattatttcaggactgagtctaactcagactgctgtggaattggcagcgtaagcctacttgtgtgataatgatgaaaccaagtgttaatgtcactattacctttttttcatatttctgatctttttatgtgtatcaggtggcaaaatatccaaagaaagggtcccaagcggtacatcgtcatagccggaaacagtcagagccaccagccaatgatcttttcaatgctgcgaaagctgccaaaagtgacatgcaggtaaaagcagtgtcttacctctgttgataccatctcactttttgtaaggtggtaaggacaagtgtctacaaacttgatttgatgtgaacattttagtgagtgtaacatatcaagaaagataagattatggggtgaatccttggagtgatagaagggtaaccttgaataagagagcatgttctttttttttttttttttttttgagacagtctctttctgttgcccaggctggagtgcagtggcacagtctcagctcactgcagcctctgcctcctgggttcaagcgattctcatggtcttgggaggctgaggcctcccaagtagctgggcttacaggcatgtgccaccatgcctagctaatttttgtatttttagtagagatggggtttcgccatgtcggccaggctggtctccaactcctgacctcaggtgatccgcctgcctcggcctcccaaagtgctgggattacaggtgtgagccaccgcactcggcttcgagagagcgtttcttttcttaaagcgtgttcttttcttaaaggtatcacaggagtgattatgcctttattgattgatggagcagatgaggagaggcattgcatgacatgggaaggaagcttagatgtgggtggcaccttgttcacccgtgttattttttagctccatcttgacaattatacttaattattttttccctctctgtttctttttttataattttattgaagttctaatatctgaaagtgtacaaagcgtatatgtagtttaaaaaataaaaatgagatatcacccagatctctagccccagctcaagaaatgaaacattaatagtgctgtagagatcctttgtgtaccttctttctaccctacctcacagtccccttattacccataggtaaacactagggtgaactttgtgttaatctttctcatctttcattatagtgttaccactatgaatgtgttctttaattatgtaaatgaatccattattcaggcttctgtgatttaattatttcagttaagattgtttgagatttatccacattaacatgtagttttatagtttctgggaaaatatttaaaattttcaaacatacagaattttgctagttatattttcgttatttgatttctaactttattgtgttgtagtcagggaatgtggtgtttgaaatttatgtaggggctgggcacagtggctcacatctgtgatcccagcacttggggaggctgaggcaggcagatcacttgaggccaggagttcgagaccagcctggccaacatggcgaaaccccatctctactaaaaatacacaaattagctgcatgtggtggcatttgtctgtaatcccagccacttgggaggctgaggcatgagaattgcttgaacccaggaggtggaggttgcagtgagctgagattgtgccacggcactccagcctgggtgacagagtgatactctgtctcaaaaaaaaaaaaaaaaaaaaaaagacatttatggagacttagccttatggcctagtattgagttggcacaatcattttatcttttctgtttctttttccccctttgcttgctttcctctggatttcttatcttctacaaggacctgagcacattttaattccagttgtcttttccaccttacatgcagttgtacagtgtgttagttttttatttgaaacggagtcttgctctgtcaccaggctggagtgcagtgacgcgatcttggctcactgcacctccgcctcccgggttcaggcgattctcctgcctcagcctgccaagtagctgggactacaggcacccgccaccatgcttggctaatttttggccaccatgcccagcctgaatgaactttcaaaattggtttttaaaagaggtatggaggccgggtgcagtggctcacacctgtaactccagcactttgggaggccaagacgggcagatcacttgaggtcagaagttcgagaccagcctggccaacatggtgaaaccccatctctactaaaaatacaaaaaggtagctgggcgtggtggtgcacctgtaatcccagctactcaggaggctgaagcaggagaatcacttgaacccgagaggtagaggttgcagtgagctgagattgtgccgctgcactccagcctgggcaacaggtggagtggagaattaggctgtacaaggctggtgtttaactattttatggtttggtaacagaaagaaaatatttactaactgggtatggcacatttttgtagtcctagctacttgagaggccaaagtgggaagatgacttgaacccaggagttcaaggccagcttgggcaacacagcaagagaccccatcccttaaaaaaaagagaaaaaatatttacatgtattttactatatatatagtatttacatcgggaggaagaaatgaaaggcatggggtacatggcatttcaagaaaataaattcttccatgagagggagttaactggtaggatggaaagtgagtttggagagagggtggctctaagagtcaacttatctgtctgtgtctagggatgtccttcctgagatccgtgctatctgcattgaggaaattgggtgttggatgcaaagctacagcacgtctttcctcaccgacagctatttaaaatatattggttggactctgcatgataaggtgggattcgagtcagtttccctttccgtttccttcatctttttcctgtcctaggacacttcaccttttcctgggcctgccactgagatattttacctagtgaccaatgattaacccatcaaggcgctgaaccttgaaactccgctagcactggggagggtaggataaggtagagagagacatacccaggagatgaaatgactcaaaacatgaggtacggggagagagactttacaatggaagacagttattgatggatggtaatgcaggtgctaaggggcagccaaaggatccttctcatcatgagtactgctgtgatccttttttttttttaagtatgaagacagctgttcattgtttctgacatcttagagtcctcagtagaggggacacccaagctagaatgagggatcggagaggggagtctggacgctcagtaggggcgagtagagtgtggttggtcttatttccattctcttggttttccctcctcaccagcaccgagaagtccgcgtgaagtgcgtgaaggctctgaaagggctgtacggtaaccgggacctgaccgcacgcctggagctcttcactggccgcttcaaggtgagacgggtggtgctccttggcttggctctttgtcgtggttcccgtttccccaccttgtatctttctacccttcatgctctaagatgtcttggctatcccagcatctgcctctacgtaggcactctctttaggaggctctgattctaagagaacagaatatttggaatgggcgtaatgagatattgagtgactttctcctttctgcaggactggatggtttccatgatcgtggacagagagtacagtgtggcagtggaggccgtcagattactgatacttatccttaagtgagtcctgggaagaggggaggccagtgtctcagacctttgcccttccagggtcatctccctccacctgtcacagctgactcttccatctgtgcaggttgactgaggtcattcctgagttgcagtatgttgagagggtaatatttctgtcttctctaactccccatactcccttgtcttccactctccatttaggagttttttgtgagttatgtccttgttgcttttgcctctttttctttctagccttgattgtgccagaagacaatgtccctattcacacactctttctgcttttctgtgggcaggaacatggaaggggtgctgatggacgtggactgtgagagcgtctaccccattgtgtaggcctctaattgaggcctggcctctgctgtgggtgaatttctgtactggaagtgagtggggctccttttacgtttctttaacaccaccctctcggtttctctcccacatgtgctgctgccctacttaaggcctccccatctccgtggaagtctctctgctgtctcttttcctctctcagctccttggggctttccttagctctgcacctccttttcctttatcatctccttgggccatctcctccctctgtggtcatcattacacctccttgtttcctcctgtgctgagccctttccttgtgtccattccaccagacttttctaccctgagtgcgagataagaacgatgggtggaagagagcaacgccagagcccaggtgcccagaggactttcttccagcttctgctgtccttctttgtggagagcaaggtgacatacacagagataactctggctgttgtgcataggacctacaagtgggctggggttggtggttcacgcctgtaagcccaacactttgggaggctgaggtgggaggatcctttgagcccaggagtttgagaccagcttgggcaacatagtgagaccctgtctctaccaaaaaaaaaaaaaaaaaaaaagacagatggagaaggatgggggtgtacactgtaggaaggagagcgatatttaatcagtaaccacttcctagggtattttaacatgccatcactaaatccccatgcacctccttccccagctccacgaccacgctgcttacttagtagacaacctgtgggactgtgcagggactcagctgaaggactgggagggtctgacaagcctgctgctggagaaggaccagagcacgtgccacatggagccagggccagggaccttccacctcctagggtgaaaccaggagagattgcttgcttcacttgtacaaggcaggaacggtggcatggggtgggggaaacttggagttggaaggtggctaatctttgattctatgtttttgatcctcctggcactccagacctgggtgatgtgcaggagagcacactgatagaaatccttgtgtccagtgcccagcaactcctgcctcagcctcccgagcagctgggactacaggcgcccgccaccacgcctggctaacttttttgtatttttagtagagacgggttttcaccgtgttagccaggatggtcttgatctcttgaccttgtgatccacctgcctcatcatcccaaagtgctgggattacaggcgtgagccactgcgcccagcatgttagacaatttttaattcatcctctctgtgctgttgttttctcagctgtgaaaggaatattctggtggggacaaggttacagagttgctgagagggtctcatgacatgaaggtactggccttggcacagtgcctgggggggcggggactccgcacatgcctgtgatgtcacagttactgtcagttcacagtgaaccttccctccttttcctgttgactttcccacactcctgtaaccctccctccctcccttcttcctctctctctctctcactcacgcacacgcacacacacacacacacacacacacacacactccattcactgtctccatgactctggagtaaactaacgtctcgagttgccattggaagccccattgtcctcattttgttttgttttgtttgtttgagacggggtctcgctctgtcccccaggctggagtgcagtggtgcgatctcagcccactgcagcctccgcctcctaggttcaagcgattctcctgcctcaccctcctgagtagctgtgatcataggtgcccgccaccacacccgactaatttttgtgttttttagtagagacagggtttcactatgttggccaggctggtctcaaactcctgacctcaggtgatccgcccaccttggcctcccaaagtgctgggattacaggagtgagccaccatgcccagcctccgttgtcctcatttagactttcatgggttataggcacttttgacttcctggggtccttcttcagttaaaaaaaaaaattagaaaattaggccgggcgtggtggcacatgcctgtaatcccagcactttatgaggccgagatgggaggatcacctgaggtcgggagttcaagaccagcctgaccaatgtggagaaaccccgtccctactaaaaatagaaaattatttgggtgtggtggtgcatgcctgtaatcccagctactcaggaggctgaggcaggagaatcgcttgaacccgggaggtggaggttgcggtcagccgagatcatgccactgcactccagcctaggcaacaagagtgaaactctgtcttaaaaaaaaaaattaaaaattatattcgggccgggcttggtggctcaatcctataataccagcaccttaggaggccaaggcaggaggatcacttgaggccaggagttcaagactggcctgggcaacataatgagaacccatctttaccaaaaaaataaaattacattaaaaattagctgggcacggtgacgtctgcctgaggtcacattcaagaagctgatgtgggaggatcgcttgagcccaggaattggaggctgcagtgagctaagatcataccactgcacttcagcctgggcgtcagagtgagaccctgtttctaaaataataataattttaaaaaatgatatttatggttgcattgggaaaagatcaatctattaatatacgtgaagacatttttggcctaaaagttatatatattttttccttctgattttaaaagaaatggggccaggcatgatagctcatacctgtaatcccagcactttgggaggcccaggttggtggatcacctgaggtcaggagttcgagaccagcctggccaacatggtgaaaccccatctctactaaaaatacaaaaattacccgggcgtggtgtcacacgcctctaatcccagctactcaggagactaaggcaggagaatcgcttgaacccaggaagcgaaggttgcagtgagaccagatcgcatcattgtactccagcctgggcgacaagaacaaaactctgtctccaaaacaataacaacagcaaaacaaatgaataaaactcattatattcatttgcttttatttatttatatttaactttattattattattattattttgagacagagtctcattctatcacccaggctggagtgcaatgaggcaatctcgcctcatgcaacctccatctcccgggttcaagcaattctcctgtctcctccaggtagctggggttacaggtgtgcagcaccacacctggctaatttttttatttttagtggagattgggtttcatcatgttggccaggctgatctcgaaagcctgacctcaagtgatccgcccaccttaggctcccaaagtgtggggagccaccgtcccggcgtattattacttttagagacgaggtcttgctttgttttccaggctggagtacagtggctcaatcatagctcactgcagcctcaaactcctggccttaagcaatcctcctacttcagcctcccaaagtgctgagattataggtgtgagccactgcacctggcctctctattctctccttcctctttctagaatttctattaggcggatgttgaatctcctgaattaatctctaattttcttcccttccctttcccttctccttcccttcccttccccttctctcccctcccctcccctcccttcccctctcctcccctcccttcccttctctccttcctttctctctctctttctctctttctttcttttatagtctcattctgtcacccaggctggagtgcagtggcagttctcagctcaccgaaacctctgcctcccgggctcaagcaattctcatgtctcagcctcccaagtagctgggattacgggtgcacaccaccacacctggctgatttatgtatttttttcgtagagacagggttttgccatgttggccgggctggtctcgaactcctgacctcgggtgatccacccacctcagcctcccaaagtgctgggattacaggtgtgagccaccgtgcccggccttgactaccatattttaaatttactggaggacttttttgttctcttcttttttctttttttaatagcatcccgctcttatttcagaataaaaaaaattttaaggtatgttgagtaagaatctatagagcaatgaaaatgcaagagcaatagctatgggcaccaaatggtcaatcttcttatcataatgttgagtggaagaagccaggtccaccagacacatgctgctcatttatgcaaagtttggacacaggcaaaacaaaactagtttgatcgtgatgggaaacattagagaaatgcaaagacatgaccatcataattgtcaggagaaggcattggttaggattgggaagcggcaagcagaagcatttagggattggctggcaatgttttacttctcggctgagtgagggttgcatcggtgtttatttgataacacgttctaggggctgggcaagatggctcatgtttgtagtctcagtactttgggaggccaaagatgggaggattgcttgagcccgtgagtttgagaccagcgtgggtgacatagcgagaccctgtctctacaaaaaattaaaaaaaaaaaaaaaaacccagctgcgtgtggtggcacagcctcaaactcctgggctcaagcgatcctcccttggccttccagccactcaggaggctggggtgggaggatcgcttgaacccaggagtttgaggctgcagtgagctatgaatgagccactgcactccagcctgggcaacagggcaagaccctgtctcaaaaaaaaaaaatttaatttgaacacttctgttttgtgcagttttctctgttatattttactttttaaaaagaaaaagcggctgggcgcggtggctcacgcctgtaatcccagcactttgggaggccaaggtgggcggatcacctgatgtcaggagttcgagaccagcctgaccaacatggagaaacctcgtctctactaaaaacacaaaaaattagccgggcgtggtggcgcatgcctgtaatcccagctactcgggaggctgaggcaggagaatcgcttgaacctaggaggcagaggttgcagtgagctgagattgcaccactgcaccccagcctgggcaataagagtgaaactccatctcaaaaaaaaaaaaaaaaaaaggtgcatgaaacatatgaagcaaaaagtgaaagtccccattcttttcctttttccagaggtgatttttgtggccaatctggtttcattccctcccagacacttttctaggcatctatgcgcctctattcacatataaacaaaataggagttttcctgtgcttcccttaaatggcatatgtatctttcactcttttttttcacctagtggatctttaataccttaaaagctcaacctgggcttggtgcggtggctcatacgtgtaatcccaggcctttgggaggccaaggtgggaggatcacttgagctcaggagttccagaccattccaaagcaaaaacaaaaggattttgagatcagtgtgggcaacttagcaaaacaccatctcttaaaaaaaaaaaaaaattagccaagcttggtggtgtaagcctgtagtcccagctacttgagaggctgaggtgggaggattgtttgaacccaggaggttgaggctacagtgagctgtgattgtgccactgcactccaggttgggtaatgcagcgagactgcgtctcaaaaaataaataaaataaaaaataaataaaagctccacctgtcttccttttagatgttgcatagcatttcacacagtattgatgtattacagctcaactaaattaatcccagtatctagcacttggggtggtgggaaggattaagggagataatataagccaagtgcccagaacaagggcttggcacaccaggctcgccttgaacaatttgtttttttgttgttttgtgtgtgtgtgtgttttttttttgagacagcatctcattgcatcaccgaggttgtagtgcagtggtgcagtcgtagctcactactgtctcagacacctgggatcaagcgatcctcccacctcagcctccggagtagctgggactacacatgcatcaccacaccccactaatttttaaattttttgtagagacagagtctcattatgttgcctaggctggtctcaaactcctggcctcaattaatcctcctcccttggcctcccaaagtgctgggattacagggatgagccactgtacctggcagccttgagcgatttctcacctcctcattggcccagtttccttatctgtaaatgagagtagctgtaaaatatggttaatgtgaggaccaaacgggtcaattagggaaaagcagtgtctctgccagcacctgacacttctttttttttttttttgtgagacagtctcactctgctgcccaggctggagtgcagtggtgcaatcttggctcactgcaacctccacctcccaggttcaagcaattcccctgcctcagccttctgattagctgggactacaggtgcctgccaccacgcctggctaattttggaatttttagtagagatgtggtttcaccatcttggcctggctggtcttgaacacctgaactcaggtgatctgcccacctcagcctcccaaagggctgggattacaggtgtaatggttaaggaggcaaatcttaaataaaggccgggcacagtggctcacgcctgtaatcccagctactcgggaggctgaggcaggagaattgcttgaacccgggattgcagtgagccaagatcgcaccactacacttcagcctgggtgacagaatgagactccgtcttaaaaaaaaaaaaaaaaaaatttaaataaaatgcatgcaatgtggtccaggcgtggtggtgcatgcctgtaaccccagcactttgggagatagaggcaggtggatcccttgagcttaggaatttgagactaggctgggcaacatagtgagacctcatctctaaaattaaaaaaataaaagccaccagaaaaaaacctaaaaacatgccaagtgacatcagtctttgatgaaaatggcagcagaagagtgatgccatgggtgggggtgggaaatgctatttcagcagagagggagctgtcacggaagacaccatgtggctgggcacggtggctcacacctgtaatcccaacacgttgggaggccaaggtgggcagatcacttgaggtcaggagttcaagaccagcctggccaacatggcaaaaccccatctctactaaaatccaaaaattagtcgggtatggcagtgcacgcctgtaatcccagatactcggaaggctgaggcaggagaatcatttgaacctgggaagtggaggttgcagtgagccaagatcgtgtcactgcactctagcctaggtgataaagcgagactcagtctcaaaaaataaaggaagaaaaagaaaccaggtgactgttgtgcccgtctcttgtccccgatctttctcccaatcctgaggtccatcagctggaaggacatatccatccggaggcctccccaagtgtggtggg

SEQ ID NO: 250 - DNA, 14448 bp, Homo sapiens
ggactgcgttttttttccgaacgcccgcagcagggtcagaagggaggtggtcgccctccgtcgtggtctggcgtgtattccgagcgttggtgtctggcggtttccgagcgttggtgtctggcggtttccgaccgttggtgtctggcggtttccgaccgttggtgtctggcacgcgccaccctctcttgctttggttgcgccatgccgatgtaccaggtaaagccctatcacggggtctgcgcccctctccgtgtggagcccacctgcatgtactggctccccaacatgcacggcaggagcggcggcccagcacttggcactggccacttgcaggtaggagcgcggggccccccgcccactgcgcacgcgcggcggccgggtgctggcccgggtgcccctaggccggatagagtgcgtcccaaccgattcgcggccccaccccggcatctgtgccggccggccaggggctcacccagatttttatgttttaaaagatttattcaggccgggcgccgtggctcacgcctgtaatcccggcactttgggaggccgaggcgggcggatcacctgagatcaggagttcgagaccagtctggccaacatggtgaaaccccgtgtctactaaaaatgcaaaaattagccgggcgtgtgtcgggcgcctgtaatcgcagctactcgggaggctgaggcaggagaatggtttgaaccctggaggcggagcttgcagtgagctgagatcgagccattgcactcgagcctgggcagcaagagtgaaactccgtctcaaaaaaaaaaattattatatacatatatatctttatatatattaaatatacctttattatgcgtattatacatattgtatattatgtgtaatatatgacataatatattataaaatatattatatattatatatatatatattttttttcctggtcgagcgcggtggttcacgcctggaatctcagcgctttgggagaccgaagcgggaggattgcttgggagaccgaagcgggaggattgcttgagcccggagagtttgagaccaccctgagcaacatagcaagacccttgtctctatgttttttttttttttttgagttggagtcttgctctgtcgcccaggctggaatgcagtggcctgatctcggctcactgcaagctccacctcccgggttcacgccattctcctgcctcagcctccccagtagctgggactacaggcgcccgccaccacgcctggctaactttattttgtatttttagtagagacatggtttcaccgtgttagccaggatggtctcgatctcttgacctcgtgattcgcctgcctcggcctcccaaattgctgggattacaggcgtgagccaccacgcccagctgccttgtctctattttttaaatgttttaattaaaataaaaatctatccatatttttttttttttttgcgtatggctgcttaaacattttagttcagaattctatcctctgaaaagtgaatagcacataaatgctcattttgaggaattacaaagcgaaccccagggtcaccacctcctaggttgacacacattgtcaccgctccattctttccacttaaaccttccccaccagcaccccagggcctgatttttatggtaattatgtcatgcttgtctctattattttgtcagctaagtatccctaaacaatatggtcaggttttttgtttgtttgttttttttgtttttttcagacggagtttcactctgtcacccaggctggagtgcagtggcatgatctcagctcactgccaccttggcctcctgggttcaagcaattctcaggcctcagcctcatgagtagctgagattacaggcactgtccactgcacctggctaatttttgtatttttagtagagacggggttttgccatgttgaccaggctggtcttgaactcctgacctcaggcgatccgcccgccttgaactcccaaagtgctggattacaggtgtgagccaccgtgcccggcacctaaacaacatagttttgatataggtaagcatacagcatatattttgatgtatttcaggtaatttagtctaagaacaggaaaggacagaaaatgaacacaatttgtagttctttgttcttaacaaactaagaatactttgcttaaataagtagcaatgagaatgtaactcagtaattcatacaaatagacaagaagacaagaaaatgatttgaggacagcttcaatcgcggtgtgaagaagaaagcagcaaaacgaccactgaaaacaacgccggtgagtcagccagttttcttttgtttttgaatcttgtgggggaatcagcccagttattcgggaggctgaggcaggagaatggcacgaaccccgggggcagagctggcagtgagccgagatcacgccactgcacgccagcctgggcgacagagcgagactccgtctcaaaaaaaagagaaaacctaagaggttcaggtgatatggttcaaaaaaggacaagatttacaaagtattaagggacggaaataggaagaagagaaatttcgaagagaaaagaaaagaaaaggatgtttggttatagagatacgggaaggagactcaaggaattttttttttaaagggaaaaaagttaataaacttcataatataaaaatcaattatttcaggactgagtctaactcagactgctgtggaattggcagcataagcctacttgtgtgataatgatgaaaccaagtgttaatgtcactgttacctttttttcatatttctgatctttttatgtgtatcaggtggcaaaatatccaaagaaagggtcccaagcggtacatcgtcatagccggaaacagtcagagccaccagccaatgatattttcaatgctgcgaaagctgccaaaagtgacatgcaggtaaaagcagtgtcttacctctgttgataccatctcactttttgtaaggtggtaaggacaagtgtctacaaacttgatttgatgtgaacattttagtgagtgtaacatatcaagaaagataagattatggggtgaatccttggagtgatagaaggtaaccttgaataagagagcatgttctttttttttttttttttttttttgagacagtctctttctgttgcccaggctggagtgcagtggcacagtctcagctcactgcagcctctgcctcctgggttcaagcgattctcatggtcttgggaggctgaggcctcccaagtagctgggcttacaggcatgtgccaccatgcctagctaatttttgtatttttagtagagatggggtttcaccatgtcggccaggctggtctccaactcctgacctcaggtgatccgcctgcctcggcctcccaaagtgctgggattacaggtgtgagccaccgcacccggcttcgagagagcgtttcttttcttaaagcgtgttcttttcttaaaggtatcacaggagtgattatgcctttattgattgatggagcagatgaggagaggcattgcatgacatgggaaggaagcttagatgtgggtggcaccttgttcacccgtgttattttttagctccatcttgacaattatacttaattattttttccctctctgtttctttttttataattttattgaagttctaatatctgaaagtgtacaaagcgtatatgtagtttaaaaaataaaaatgagatatcacccagatctctagccccagctcaagaaatgaaacattaatagtgctgtagagatcctttgtgtaccttctttctaccctacctcacagtccccttattacccataggtaaacactagggtgaactttgtgttaatctttctcatctttcattatagtgttaccactatgaatgtgttctttaattatgtaaatgaatccattattcaggcttctgtgatttaattatttcagttaagattgtttgagatttatccacattaacatgtagttttatagtttctgggaaaatatttaaaattttcaaacatacagaattttgctagttatattttcgttatttgatttctaactttattgtgttgtagtcagggaatgtggtgtttgaaatttatgtaggggctgggcacagtggctcacatctgtgatcccagcacttggggaggctgaggcaggcagatcacttgaggccaggagttcgagaccagcctggccaacatggcgaaaccccatctctactaaaaatacacaaattagctgcatgtggtggcatttgtctgtaatcccagccacttgggaggctgaggcatgagaattgcttgaacccaggaggtggaggttgcagtgagctgagattgtgccacggcactccagcctgggtgacagagtgatactctgtctcaaaaaaaaaaaaaaaaaaaaaagacatttatggagacttagccttatggcctagtattgagttggcacaatcattttatcttttctgtttctttttccccctttgcttgctttcctctggatttcttatcttctacaaggacctgaacacattttaattccagttgtcttttccaccttacatgcagtagtacagtgtgttagttttttatttgaaacggagtcttgctctgtcaccaggctggagtgcagtgacgcgatcttggctcactgcacctccgcctcccgggttcaggcgattctcctgcctcagcctgccaagtagctgggactacaggcacccgccaccatgcttggctaatttttggccaccatgcccagcctgaatgaactttcaaaattggtttttaaaagaggtatggaggccgggtgcagtggctcacacctgtaactccagcactttgggaggccaagacgggcagatcacttgaggtcaggagttcgagaccagcctggccaacatggtgaaaccccatctctactaaaaatacaaaaaggtagctgggcgtggtggtgcacctgtaatcccagctactcaggaggctgaggcaggagaatcacttgaacccgagaggtagaggttgcagtgagctgagattgtgccgctgcactccagcctgggcaacaggtggagtggagaattaggctgtacaaggctggtgtttaactattttatggtttggtaacagaaagaaaatatttactaactgggtatggcacatttttgtagtcctagctacttgagaggccaaagtgggaagatgacttgaacccaggagttcaaggccagcttgggcaacacagcaagagaccccatcccttaaaaaaaagagaaaaaatatttacatgtattttactatatatatagtatttacatcgggaggaagaaatgaaaggcatggggtacatggcatttcaagaaaataaattcttccatgagagggagttaactggtaggatggaaagtgagtttggagagagggtggctctaagagtcgacttatctgtctgtgtctagggatgtccttcctgagatccgtgctatctgcattgaggaaattgggtgttggatgcaaagctacagcacgtctttcctcaccgacagctatttaaaatatattggttggactctgcatgataaggtgggattcgagtcagtttccctttccgtttccttcatctttttcctgtcctaggacacttcaccttttcctgggcctgccactgagatattttacctagtgaccaatgattaacccatcaaggcgctgaaccttgaaactccgctagcactggggagggtaggataaggtagagagagacatacccaggagatgaaatgactcaaaacatgaggtacggggagagagactttccaatggaagagatttattgatggatggtaatgcaggtgctaaggggcagccaaaggatccttctcatcatgagtactgctgtgatccttttttttttttaagtatgaagacagctgttcattgtttctgacatctcagagtcctcagtagaggggacacccaagctagaatgagggatcggagaggggagtctggacgctcagtaggggcgagtagagtgtggttggtcttatttccattctcttggttttccctcctcaccagcaccgagaagtccgcgtgaagtgcgtgaaggctctgaaagggctgtacggtaaccgggacctgaccgcacgcctggagctcttcactggccgcttcaaggtgagacgggtggtgctccttggcttggctctttgtcgtggttcccgtttccccaccttgtatctttctacccttcatgctctaagatgtcttggctatcccagcatctgcctctacgtaggcactctctttaggaggctctgattctaagagaacagaatatttggaatgggcgtaatgagatattgagtgactttctcctttctgcaggactggatggtttccatgatcgtggacagagagtacagtgtggcagtggaggccgtcagattactgatacttatccttaagtgagtcctgggaagaggggaggccagtgtctcagacctttgcccttccagggtcatctccctccacctgtcacagctgactcttccatctgtgcaggttgactgaggtcattcctgagttgcagtatgttgagagggtaatatttctgtcttctctaactccccatactcccttgtcttccactctccacttaggagttttttgtgagttatgtccttgttgcttttgcctctttttctttctagccttgattgtgccagaagacaatgtccctattcacacactctttctgcttttctgtgggcaggaacatggaaggggtgctgatggacgtggactgtgagagcgtctaccccattgtgtaggcctctaattgaggcctggcctctgctgtgggtgaatttctgtactggaagtgagtggggctccttttacgtttctttaacaccaccctctcggtttctctcccacatgtgctgctgccctacttaaggcctccccatctccgtggaagtctctctggtgtctcttttcctctctcagctccttggggctttccttagctctgcacctccttttcctttatcatctccttgggccatctcctccgtctgtggtcatgattacacctccttgtttcctcctgtgctgagccctttccttgtgtccattccaccagacttttctaccctgagtgcgagataagaacgatgggtggaagagagcaacgccagagcccaggcgcccagaggactttcttccagcttctgctgtccttctttgtggagagcaaggtgacatacacagagagaactctggctgttgtgcataggacctacaagtgggctggggttggtggctcacgcctgtaagcccagcactttgggaggctgaggtgggaggatcctttgagcccaggagtttgagaccagcttgggcaacatagtgagaccctgtctctaccaaaaaaaaaaaaaaaaaagacaaatggagaaggatgggggtgtacactgtaggaaggagagcgatatttaatcagtaaccacttcctagggtattttaacatgccatcactaaatccccatgcacctccttccccagctccacgaccacgctgcttacttagtagacaacctgtgggactgtgcagggactcagctgaaggactgggagggtctgacaagcctgctgctggagaaggaccagagcacgtgccacatggagccagggccagggaccttccacctcctagggtgaaaccaggagagattgcttgcttcacttgtacaaggcaggaacggtggcatggcgtgggggaaacttggagttggaaggtggctaatctttgattctatgtttttgatcctcctggcactccagacctgggtgatatgcaggagagcacactgatagaaatccttgtgtccagtgcccagcaactcctgcctcagcctcccgagcagctgggactacaggtgcccgccaccacgcccggctaacttttttgtatttttagtagagacgggttttcaccgtgttagccaggatggtcttgatctcttgaccttgtgatccacctgcctcatcatcccaaagtgctgggattacaggcgtgagccactgcgcccagcatgttagacaatttttaattcatcctctctgtgctgttgttttctcagctgtgaaaggaatattctggtggggacaaggttacagagttgctgagagggtctcatgacatgaaggtactggccttggcacagtgcctgggggggcggggactccgcacatgcctgtgatgtcacagttactgtcagttcacagcgaaccttccctccttttcctgttgactttcccacactcctgtaaccatccctccctcccttcttcctctctctctctctcactcacgcacacgcacacacacacacacacactccattcactgtctccatgactctggagtaaactaacgtctcgagttgccattggaagccccattgtcctcattttgttttgttttgtttgtttgagacggggtctcgctctgtcccccaggctggagtgcagtggtgcgatctcagcccactgcagcctctgcctcctaggttcaagcgattctcctgcctcaccctcctgagaagctgtgatcataggtgcccgccaccacacccgactaatttttgtgttttttagtagagacagggtttcactatgttggccaggctggtctcgaactcctgacctcaggtgatccgcccaccttggcctcccaaagtgctgggattacaggagtgagccaccacgcccagcctccgttgtcctcatttagactttcctgggttataggcacttttgacttcctggggtccttcttcagttaaaaaaaaaaattagaaaattaggccgggcgtggtggcacatgcctgtaatcccagcactttatgaggccgaggtgggaggatcacctgaggtcgggagttcaagaccagcctgaccaatgtggagaaaccctgtctctactaaaaatagaaaattatttgggtgtggtggtgcatgcctgtaatcccagctactcaggaggctgaggcaggagaatcgcttgaacccgggaggtggaggttgcggtcagccgagatcgtgccactgcactccagcctaggcaacaagagtgaaactctgtcttaaaaaaaaaaaattaaaaattatattcgggccgggcttggtggctcaatcctataataccagcaccttaggaggccaaggcaggaggatcacttgaggccaggagttcaagaccggcctgggcaacataatgagaacccatctttaccaaaaaaataaaattacattaaaaattagctgggcacggtgacgtctgcctgaggtcacattcaagaagctgatgtgggaggatcgcttgagcccaggaattggaggctgcagtgagctaagatcataccactgcacttcagcctgggcgtcagagtgagaccctgtttctaaaataataataattttaaaaaatgatatttatggttgcattgggaaaagatcaatctattaatatatgtgaagacatttttggcctaaaagttatatatattttttccttctgattttaaaagaaatgaggccaggcatgatagctcatacctgtaatcccagcactttgggaggcccaggttggtggatcacctgaggtcaggagttcgagaccagcctggccaacatggtgaaaccccgtctctactaaaaatacaaaaattacccgggcgtggtgtcacacgcctctaatcccagctactcaggagactaaggcaggagaatcgcttgaacccaggaagcgaaggttgcagtgagaccagatcgcatcattgtactccagcctgggcgacaagaacaaaactctgtctccaaaacaataacaacagcaaaacaaatgaataaaactcattatattcatttgcttttatttatttatatttaactttattattattattattattttgagacagagtctcattctatcacccaggctggagtgcaatgaggcgatctcacctcatgcaacctccatctcccgggttcaagcgattctcctgtctcctcccaggtagctggggttacaggtgtgcagcaccacacctggctaatttttttatttttagtggagattgggtttcatcatgttggccaggctggtctcgaaagcctgacctcaagtgatccgcccaccttagcctcccaaagtgtggggagccactgtcccggcatattattacttttagagacgaggtcttgctttgttttccaggctggagtacagtggctcaatcatagctcactgcagcctcaaactcctggcctcaagcaatcctcctacttcagcctcccaaagtgctgagattataggtgtgagccactgcacctggcctctctattctctacttcctctttctagaatttctattaggcggatgttgaatctcctgaattaatctctaattttcttcccttccctttcccttctccttcccttcccttccccttctctcccctcccctcccctcccttcccctcccctcccctcccttcccttccctccttcctttctctctctctttgtctctttctttcttttatagtctcattctgtcacccaggctggagtgcagtggcagttctcagctcaccgaaacctctgcctcccgggctcaagcaattctcatgtctcagcctcccgagtagctgggattacgggtgcacaccaccacacctggctgatttatgtatttttttcgtagagacagggttttgccatgttggccgggctggtctcgaactcctgacctcgggtgatccacccacctcagcctcccaaagtgctgggattacaggtgtgagccactgtgcccggccttgactaccatattttaaatttactggaggacttttttgttctcttcttttttctttttttaatagcatcccgctcttatttcagaataaaaaaatttttaaggtatgttgagtaagaatctatagagcaatgaaaatgcaagagcaatagctatgggcaccaaatggtcaatcttcttatcataatgttgagtggaagaagccaggtccaccagacacatgctgctcatttatccaaagtttggacacaggcaaaacaaaactagtttgatcgtgatgggaaacattagagaaatgcaaagacatgaccatcataattgtcaggagaaggcattggttaggattgggaagcggcaagcagaagcatttagggattggctggcaatgttttacttctcagctgagtgagggttgcatcggtgtttatttgataacacgttctaggggctgggcaagatggctcatgtttgtagtctcagtactttgggaggccaaagatgggaggattgcttgagcccgtgagtttgagaccagcgtgggtgacatagcgagaccctgtctctacaaaaaattaaaaaaaaaaaaaaaaaccagctgcgtgtggtggcacagcctcaaactcctgggctcaagcgatcctcccttggccttccagccactcaggaggctggggtgggaggatcgcttgaacccaggagtttgaggctgcagtgagctatgaatgagccactgcactccagcctgggcaacagggcaagaccctgtctcaaaaaaaaaaaaatttaatttgaacacttctgttttgtgcagttttctctgttatattttactttttaaaaagaaaaagcagctgggcgcggtggctcacgcctgtaatcccagcactttgggaggccaaggtgggtagatcacctgatgtcaggagttcgagaccagcctgaccaacatggagaaacctcgtctctactaaaaacacaaaaaattagccgggcgtggtggcgcatgcctgtaatcccagctacttgggaggctgaggcaggagaatcgcttgaacctaggaggcagaggttgcagtgagctgagatcgcaccactgcaccccagcctgggcaataagagtgaaactccatctcaaaaaaaaaaaaaaaaaggtacatgaaacatatgaagcaaaaagtgaaagtccccattcttttcctttttccagaggtgatttttgtggccaatctggtttcattccctcccagacacttttctaggcatctatgtgcctctattcacatataaacaaaataggagttttcctgtgcttcccttaaatggcatatgtatctttcactcttttttttcacctagtggatctttaataccttaaaagctcaacctgggcttggtgcggtggctcatacgtgtaatcccaggcctttgggaggccaaggtgggaggatcacttgagctcaggagttccagaccattccaaagcaaaaacaaaaggattttgagatcagtgtggacaacttagcaaaacaccatctctaaaaaaaaaaaaaaaaaaaaaaattagccaagcttggtggtgtaagcctgtagtcccagctacttgagaggctgaggtgggaggattgtttgaacccaggaggttgaggctacagtgagctgtgattgtgccactgcactccaggttgggtaatgcagcgagactgcgtctcaaaaaataaataaaataaaaaataaataaaagctccacctgtcttccttttagatgttgcatagcatttcacacagtattgatgtattacagctcaactaaattaatcccagtatctagcacttggggtggtgggaaggattaagggagataatataagccaagtgcccagaacaagggcttggcacaccaggctcgccttgaacaatttgtttttttgttgttttgtgtgtgtgtggttttttttttttgagacagcgtctcattgcatcaccgaggttgtagtgcagtggtgcaatcgtagctcactactgtctcagacacctgggatcaagcgatcctcccacctcagcctccggagtagctgggactacacatgcatcaccacaccccactaatttttaaattttttgtagagacagagtctcattatgttgcctaggctggtctcaaactcctggcctcaattaatcctcctcccttggcctcccaaagtgctgggattacagggatgagccactgtacctggcagccttgagcgatttctcacctcctcattggcccagtttccttatctgtaaatgagagtagctgtaaaatatggttaatgtgaggaccaaacaggtcaattagggaaaagcagtgtctctgccagcacctgacacttcttttttttttttttgtgagacagtctcactctgctgcccaggctggagtgcagtggtgcaatcttggctcactgcaacctccacctcccaggttcaagcaattcccctgcctcagccttctgattagctgggactacaggtgcctgccaccacgcctggctaattttggaatttttagtagagatgtggtttcaccatcttggcctggctggtcttgaacacctgaactcaggtgatctgcccacctcagcctcccaaagggctgggattacaggtgtaatggttaaggaggcaaatcttaaataaaggccgggcacagtggctcacgcctgtaatcccagctactcgggaggctgaggtaggagaattgcttgaacccgggattgcagtgagccaagatcgcaccactacacttcagcctgggtgacagaatgagactccgtcttaaaaaaaaaaaaaaaaaaaatttaaataaaatgcatgcaatgtggtccaggcgtggtggtgcatgcctgtaaccccagcactttgggagatagaggcaggtggatcccttgagcttaggaatttgagactaggctgggcaacatagtgagacctcatctctaaaattaaaaaaataaaagccaccagaaaaaaacctaaaaacatgccaagtgacatcagtctttgatgaaaatggcagcagaagagtgatgccatgggtgggggtgggaaatgctatttcagcagagagggagctgtcacggaagacaccatgtggctgggcacggtggctcacacctgtaatcccaacacgttgggaggccaaggtgggcagatcacttgaggtcaggagttcaagaccagcctggccaacatggcaaaaccccatctctactaaaatccaaaaattagtcgggtatggcagtgcacgcctgtaatcccagatactcagaaggctgaggcaggagaatcatttgaacctgggaagtggaggttgcagtgagccaagatcgtgtcactgcactctagcctaggtgatacagcgagactcagtctcaaaaaataaaggaagaaaaagaaaccaggtgactgttgtgcccgtctcttgtccccgatctttctcccaatcctgaggtccatcagctggaaggacatatccatccggaggcctccccaagtgtggtggg

SEQ ID NO: 251 - DNA, 14417 bp, Homo sapiens
agcagggtcagaagggaggtggtcgccctccgtcgtggtctggcgtgtattccgagccttggtgtctggcggtttccgagcgttggtgtctggcggtttccgagcgttggtgtcttggcggtttccgaccgttggtgtctggcggtttccgaccgttggtgtctggcacgcgccaccctctcttgctttggttgcgccatgccgatgtaccaggtaaagccctatcaccgggtctgcgcccctctccgtgtggagcccacctgcatgtactggctccccaacatgcacggcaggagcggcggcccagcacttggcactggccacttgcaggtaggagcgcggggcaccccgcccactgcgcacgcgcggcggccgggtgctggcccgggtgcccctaggccggatagagtgcgtcccaaccgattcgcggccccaccccggcatctgtgccggccggccaggggctcacccagatttttatgttttaaaagatttattcaggccgggcgccgtggctcacgcctgtaatcccggcactttgggaggccgaggcgggcggatcacctgagatcaggagttcgagaccagtctggccaacatggtgaaaccccgtgtctactaaaaatgcaaaaattagccgggcgtgtgtcgggcgcctgtaatcgcagctactcgggaggctgaggcaggagaatggtttgaaccctggaggcggagcttgcagtgagctgagatcgagccattgcactcgagcctgggcagcaagagtgaaactccgtctcaaaaaaaaaaattattatatacatatatatctttatatatattaaatatacctttattatgcgtattatacatattgtatattatgtgtaatatatgacataatatattataaaatatattgtatattatatatatatatatttttttcctggtcgagcgcggtggttcacgcctggaatctcagcgctttgggagaccgaagcgggaggattgcttgagcccggagagtttgagaccaccctgagcaacatagcaagacccttgtctctatgttttttttttttttttgagttggagtcttgctctgtcgcccaggctggaatgcagtggcctgatctcgactcactgcaagctccacctcccgggttcacgccattctcctgcctcagcctccccagtagctgggactacaggcgcccgccaccacgcctggctaactttattttgtatttttagtagagacttggtttcaccgtgttagccaggatggtctcgatctcttgacctcgtgattcgcctgcctcggcctcccaaattgctgggattacaggcgtgagccaccacgcccagctgccttgtctctattttttaaatgttttaattaaaataaaaatctatccatattttttctttttttgcgtatggctgcttaaacattttagttcagaattctatcctctgaaaagtgaatagcacataaatgctcattttgaggaattacaaagcgaaccccagggtcaccacctcccaggttgacacacattgtcaccgctccattctttccacttaaaccttccccaccagcaccccagggcctgatttttatggtaattatgtcatgcttgtctctattattttgtcagctaagtatccctaaacaatatggtctggttttttgtttgtttgtttgttttgtttttttcagacggagtttcactctgtcacccaggctggagtgcagtggcatgatctcagctcactgccaccttggcctcctgggttcaagcaattctcaggcctcagcctcatgagtagctgagattacaggcactgtccactgcacctggctaatttttgtatttttagtagagacggggttttgccatgttgaccaggctggtcttgaactcctgacctcaggcgatccgcccgccttgaactcccaaagtgctggattacaggtgtgagccactgtgcccggcacctaaacaacatagttttgatataggtaagcatacagcatatattttgatgtatttcaggtaatttagtctaagaacaggaaaggacagaaaatgaacacaatttgtagttctttgttcttaacaaactaagaatactttgcttaaataagtagcaatgagaatgtaactcagtaattcatacaaatagacaagaagacaagaaaatgatttgaggacagcttcaatcgcggtgtgaagaagaaagcagcaaaacgaccactgaaaacaacgccggtgagtcagccagttttcttttgtttttgaatcttgtgggggaagcagcccagctattcgggaggctgaggcaggagaatggcacgaaccccgggggcagagctggcagtgagccgagatcacgccactgcacgccagcctgggcgacagagcgagactccgtctcaaaaaaaagagaaaacctaagaggttcaggtgatatggttcaaaaaaggacaagatttacaaagtattaagggacggaaataggaagaagagaaatttcgaaaagaaaagaaaaggatgtttggttatagagatacgggaaggagactcaaggaattttttttttaaagggaaaaaagttaataaacttcataatataaaaatcaattatttcaggactgagtctaactcagactgctgtggaattggcagcgtaagcctacttgtgtgataatgatgaaaccaagtgttaatgtcactgttacctttttttcatatttctgatctttttatgtgtatcaggtggcaaaatatccaaagaaagggtcccaagcggtacatcgtcatagccggaaacagtcagagccaccagccaatgatcttttcaatgctgcgaaagctgccaaaagtgacatgcaggtaaaagcagtgtcttacctctgttgataccatctcactttttgtaaggtggtaaggacaagtgtctacaaacttgatttgatgtgaacattttagtgagtgtaacatatcaagaaagataagattatggggtgaatccttggagtgatagaagggtaaccttgaataagagagcatgttctttttttttttttttttttttttgagacagtctctttctgttgcccaggctggagtgcagtggcacagtctcagctcactgcagcctctgcctcctgggttcaagcgattctcatggtcttgggaggctgaggcctcccaagtagctgggcttacaggcatgtgccaccatgcctagctaatttttgtatttttagtagagatggggtttcgccatgtcggccaggctggtctccaactcctgacctcaggtgatccgcctgcctcggcctcccaaagtgctgggattacaggtgtgagccaccgcacccggcttcgagagagcgtttcttttcttaaagcgtgttcttttcttaaaggtatcacaggagtgattatgcctttattgattgatggagcagatgaggagaggcattgcatgacatgggaaggaagcttagatgtgggtggcaccttgttcacccgtgttattttttagctccatcttgacaattatacttaattattttttccctgtttctttttttataattttattgaagttctaatatctgaaagtgtacaaagcgtatatgtagtttaaaaaataaaaatgagatatcacccagatctctagccccagctcaagaaatgaaacattaatagtgctgtagagatcctttgtgtaccttctttctaccctacctcacagtccccttattacccataggtaaacactagggtgaactttgtgttaatctttctcatctttcattatagtgttaccactatgaatgtgttctttaattatgtaaatgaatccattattcaggcttctgtgatttaattatttcagttaagattgtttgagatttatccacattaacatgtagttttatagtttctgggaaaatatttaaaattttcaaacatacagaattttgctagttatattttcgttatttgatttctaactttattgtgttgtagtcagggaatgtggtgtttgaaatttatgtgggggctgggcacagtggctcacatctgtgatcccagcacttggggaggctgaggcaggcagatcacttgaggccaggagttcgagaccagcctggccaacatggcgaaaccccatctctactaaaaatacacaaattagctgcatgtggtggcatttgtctgtaatcccagccacttgggaggctgaggcatgagaattgcttgaacccaggaggtggaggttgcagtgagctgagattgtgccacggcactccagcctgggtgacagagtgatactctgtctcaaaaaaaaaaaaaaaaaaaaaaaaatttatggagacttagccttatggcctagtattgagttggtacaatcattttatcttttctgtttctttttccccctttgcttgctttcctctggatttcttatcttctacaaggacctgagcacattttaattccagttgtcttttccaccttacatgcagttgtacagtgtgttagttttttatttgaaacggagtcttgctctgtcaccaggctggagtgcagtgacgcgatcttggctcactgcacctccgcctcccgggttcaggcgattctcctgcctcagcctgccaagtagctgggactacaggcacccgccaccatgcttggctaatttttggccaccatgcccagcctgaatgaactttcaaaattggtttttaaaagaggtatggaggccgggtgcagtggctcacacctgtaactccagcactttgggaggccaagacgggcagatcacttgaggtcagaagttcgagaccagcctggccaacatggtgaaaccccatctctactaaaaatacaaaaaggtagctgggcgtggtggtgcacctgtaatcccagctactcaggaggctgaagcaggagaatcacttgaacccgagaggtagaggttgcagtgagctgagattgtgccgctgcactccagcctgggcaacaggtggagtggagaattaggctgtacaaggctggtgtttaactattttatggtttggtaacagaaagaaaatatttactaactgggtatggcacatttttgtagtcctagctacttgagaggccaaagtgggaagatgacttgaacccaggagttcaaggccagcttgggcaacacagcaagagaccccatcccttaaaaaaaagagaaaaaatatttacatgtattttactatatatatagtatttacatcgggaggaagaaatgaaaggcatggggtacatggcatttcaagaaaataaattcttccatgagagggagttaactggtaggatggaaagtgagtttggagagagggtggctctaagagtcaacttatctgtctgtgtctagggatgtccttcctgagatccgtgctatctgcattgaggaaattgggtgttggatgcaaagctacagcacgtctttcctcaccgacagctatttaaaatatattggttggactctgcatgataaggtgggattcgagtcagtttccctttccgtttccttcatctttttcctgtcctaggacacttcaccttttcctgggcctgccactgagatattttacctagtgaccaatgattaacccatcaaggcgctgaaccttgaaactccgctagcactggggagggtaggataaggtagagagagacatacccaggagatgaaatgactcaaaacatgaggtacggggagagagactttacaatggaagacagttattgatggatggtaatgcaggtgctaaggggcagccaaaggatccttctcatcatgagtactgctgtgatccttttttttttttaagtatgaagacagctgttcattgtttctgacatcttagagtcctcagtagaggggacacccaagctagaatgagggatcggagaggggagtctggacgctcagtaggggcgagtagagtgtggttggtcttatttccattctcttggttttccctcctcaccagcaccgagaagtccgcgtgaagtgcgtgaaggctctgaaagggctgtacggtaaccgggacctgaccgcacgcctggagctcttcactggctgcttcaaggtgagacaggtggtgctccttggcttggctctttgtcgtggttcccgtttccccaccttgtatctttctacccttcatgctctaagatgtcttggctatcccagcatctgcctctacgtaggcactctctttaggaggctctgattctaagagaacagaatatttggaatgggcgtaatgagatattgagtgactttctcctttctgcaggactggatggtttccatgatcatggacagagagtacagtgtggcagtggaggccgtcagattactgatacttatccttaagtgagtcctgggaagaggggaggccagtgtctcagacctttgcccttccagggtcatctccctccacctgtcacagctgactcttccatctgtgcaggttgactgaggtcattcctgagttgcagtatgttgagagggtaatatttctgtcttctctaactccccatactcccttgtcttccactctccatttaggagttttttgtgagttatgtccttgttgcttttgcctctttttctttctagccttgattgtgccagaagacaatgtccctattcacacactctttctgcttttctgtgggcaggaacatggaaggggtgctgatggacgtggactgtgagagcgtctaccccattgtgtaggcctctaattgaggcctggcctctgctgtgggtgaatttctgtactggaagtgagtggggctccttttacgtttctttaacaccaccctctcggtttctctcccacatgtgctgctgccctacttaaggcctccccatctccgtggaagtctctctgctgtctcttttcctctctcagctccttggggctttccttagctctgcacctccttttcctttatcatctccttgggccatctcctccctctgtggtcatcattacacctccttgtttcctcctgtgctgagccctttccttgtgtccattccaccagacttttctaccctgagtgcgagataagaacgatgggtggaagagagcaacgccagagcccaggtgcccagaggactttcttccagcttctgctgtccttctttgtggagagcaaggtgacatacacagagataactctggctgttgtgcataggacctacaagtgggctggggttggtggttcacgcctgtaagcccaacactttgggaggctgaggtgggaggatcctttgagcccaggagtttgagaccagcttgggcaacatagtgagaccctgtctctaccaaaaaaaaaaaaaaaaaaaaaagacagatggagaaggatgggggtgtacactgtaggaaggagagcgatatttaatcagtaaccacttcctagggtattttaacatgccatcactaaatccccatgcacctccttccccagctccacgaccacgctgcttacttagtagacaacctgtgggactgtgcagggactcagctgaaggactgggagggtctgacaagcctgctgctggagaaggaccagagcacgtgccacatggagccagggccagggaccttccacctcctagggtgaaaccaggagagattgcttgcttcacttgtacaaggcaggaacggtggcatggggtgggggaaacttggagttggaaggtggctaatctttgattctatgtttttgatcctcctggcactccagacctgggtgatgtgcaggagagcacactgatagaaatccttgtgtccagtgcccagcaactcctgcctcagcctcccgagcagctgggactacaggcgcccgccaccacgcctggctaacttttttgtatttttagtagagacgggttttcaccgtgttagccaggatggtcttgatctcttgaccttgtgatccacctgcctcatcatcccaaagtgctgggattacaggcgtgagccactgcgcccagcatgttagacaatttttaattcatcctctctgtgctgttgttttctcagctgtgaaaggaatattctggtggggacaaggttacagagttgctgagagggtctcatgacatgaaggtactggccttggcacagtgcctgggggggcggggactccgcacatgcctgtgatgtcacagttactgtcagttcacagcgaaccttccctccttttcctgttgactttcccacactcctgtaaccctccctccctcccttcttcctctctctctctctcactcacgcacacgcacacacacacacacacacacacacacacacactccattctctgtctccatgactctggagtaaactaacgtctcgagttgccattggaagccccattgtcctcattttgttttgttttgtttgtttgagacggggtctcgctctgtcccccaggctggagtgcagtggtgcgatctcagcccactgcagcctccgcctcctaggttcaagcgattctcctgcctcaccctcctgagtagctgtgatcataggtgcccgccaccacacccgactaatttttgtgttttttagtagagacagggtttcactatgttggccaggctggtctcaaactcctgacctcaggtgatccgcccaccttggcctcccaaagtgctgggattacaggagtgagccaccatgcccagcctccgttgtcctcatttagactttcatgggttataggcacttttgacttcctggggtccttcttcagttaaaaaaaaaaattagaaaattaggccgggcgtggtggcacatgcctgtaatcccagcactttatgaggccgaggtgggaggatcacctgaggtcgggagttcaagaccagcctgaccaatgtggagaaaccccgtccctactaaaaatagaaaattatttgggtgtggtggtgcatgcctgtaatcccagctactcaggaggctgaggcaggagaatcgcttgaacccgggaggtggaggttgcggtcagccgagatcatgccactgcactccagcctaggcaacaagagtgaaactctgtcttaaaaaaaaaattaaaaattatattcgggccgggcttggtggctcaatcctataataccagcaccttaggaggccaaggcaggaggatcacttgaggccaggagttcaagactggcctgggcaacataatgagaacccatctttaccaaaaaaataaaattacattaaaaattagctgggcacggtgacgtctgcctgaggtcacattcaagaagctgatgtgggaggatcgcttgagcccaggaattggaggctgcagtgagctaagatcataccactgcacttcagcctgggcgtcagagtgagaccctgtttctaaaataataataattttaaaaaatgatatttatggttgcattgggaaaagatcaatctattaatatacgtgaagacatttttggcctaaaagttatatatattttttccttctgattttaaaagaaatggggccaggcatgatagctcatacctgtaatcccagcactttgggaggcccaggttggtggatcacctgaggtcaggagttcgagaccagcctggccaacatggtgaaaccccatctctactaaaaatacaaaaattacccgggcgtggtgtcacacgcctctaatcccagctactcaggagactaaggcaggagaatcgcttgaacccaggaagcgaaggttgcagtgagaccagatcgcatcattgtactccagcctgggcgacaagaacaaaactctgtctccaaaacaataacaacagcaaaacaaatgaataaaactcattatattcatttgcttttatttatttatatttaactttattattattattattattttgagacagagtctcattctatcacccaggctggagtgcaatgaggcaatctcgcctcatgcaacctccatctcccgggttcaagcaattctcctgtctcctccaggtagctggggttacaggtgtgcagcaccacacctggctaatttttttatttttagtggagattgggtttcatcatgttggccaggctgatctcgaaagcctgacctcaagtgatccgcccaccttaggctcccaaagtgtggggagccaccgtcccggcgtattattacttttagagacgaggtcttgctttgttttccaggctggagtacagtggctcaatcatagctcactgcagcctcaaactcctggccttaagcaatcctcctacttcagcctcccaaagtgctgagattataggtgtgagccactgcacctggcctctctattctctacttcctctttctagaatttctattaggcggatgttgaatctcctgaattaatctctaattttcttcccttccctttcccttctccttcccttcccttccccttctctcccctcccctcccctcccttcccctctcctcccctcccttcccttctctccttcctttctctctctctttctctctttctttcttttatagtctcattctgtcacccaggctggagtgcagtggcagttctcagctcaccgaaacctctgcctcccgggctcaagcaattctcatgtctcagcctcccaagtagctgggattacgggtgcacaccaccacacctggctgatttatgtatttttttcgtagagacagggttttgccatgttggccgggctggtctcgaactcctgacctcgggtgatccacccacctcagcctcccaaagtgctgggattacaggtgtgagccaccgtgcccggccttgactaccatattttaaatttactggaggacttttttgttctcttcttttttctttttttaatagcatcccgctcttatttcagaataaaaaaaattttaaggtatgttgagtaagaatctatagagcaatgaaaatgcaagagcaatagctatgggcaccaaatggtcaatcttcttatcataatgttgagtggaagaagccaggtccaccagacacatgctgctcatttatgcaaagtttggacacaggcaaaacaaaactagtttgatcgtgatgggaaacattagagaaatgcaaagacatgaccatcataattgtcaggagaaggcattggttaggattgggaagcggcaagcagaagcatttagggattggctggcaatgttttacttctcggctgagtgagggttgcatcggtgtttatttgataacacgttctaggggctgggcaagatggctcatgtttgtagtctcagtactttgggaggccaaagatgggaggattgcttgagcccgtgagtttgagaccagcgtgggtgacatagcgagaccctgtctctacaaaaaattaaaaaaaaaaaaaaaaacccagctgcgtgtggtggcacagcctcaaactcctgggctcaagcgatcctcccttcgccttccagccactcaggaggctggggtgggaggatcgcttgaacccaggagtttgaggctgcagtgagctatgaatgagccactgcactccagcctgggcaacagggcaagaccctgtctcaaaaaaaaaaaatttaatttgaacacttctgttttgtgcagttttctctgttatattttactttttaaaaagaaaaagcggctgggcgcggtggctcacgcctgtaatcccagcactttgggaggccaaggtgggcggatcacctgatgtcaggagttcgagaccagcctgaccaacatggagaaacctcgtctctactaaaaacacaaaaaattagccgggcgtggtggcgcatgcctgtaatcccagctactcgggaggctgaggcaggagaatcgcttgaacctaggaggcagaggttgcagtgagctgagattgcaccactgcaccccagcctgggcaataagagtgaaactccatctcaaaaaaaaaaaaaaaaaaaggtgcatgaaacatatgaagcaaaaagtgaaagtccccattcttttcctttttccagaggtgatttttgtggccaatctggtttcattccctcccagacacttttctaggcatctatgcgcctctattcacatataaacaaaataggagttttcctgtgcttcccttaaatggcatatgtatctttcactcttttttttcacctagtggatctttaataccttaaaagctcaacctgggcttggtgcggtggctcatacgtgtaatcccaggcctttgggaggccaaggtgggaggatcacttgagctcaggagttccagaccattccaaagcaaaaacaaaaggattttgagatcagtgtgggcaacttagcaaaacaccatctcttaaaaaaaaaaaaaaattagccaagcttggtggtgtaagcctgtagtcccagctacttgagaggctgaggtgggaggattgtttgaacccaggaggttgaggctacagtgagctgtgattgtgccactgcactccaggttgggtaatgcagcgagactgtgtctcaaaaaataaataaaataaaaaataaataaaagctccacctgtcttccttttagatgttgcatagcatttcacacagtattgatgtattacagctcaactaaattaatcccagtatctagcacttggggtggtgggaaggattaagggagataatataagccaagtgcccagaacaagggcttggcacaccaggctcgccttgaacaatttgtttttttgttgttttgtgtgtgtgtgtgttttttttttgagacagcatctcattgcatcaccgaggttgtagtgcagtggtgcagtcgtagctcactactgtctcagacacctgggatcaagcgatcctcccacctcagcctccggagtagctgggactacacatgcatcaccacaccccactaatttttaaattttttgtagagacagagtctcattatgttgcctaggctggtctcaaactcctggcctcaattaatcctcctcccttggcctcccaaagtgctgggattacagggatgagccactgtacctggcagccttgagcgatttctcacctcctcattggcccagtttccttatctgtaaatgagagtagctgtaaaatatggttaatgtgaggaccaaacgggtcaattagggaaaagcagtgtctctgccagcacctgacacttctttttttttttttttgtgagacagtctcactctgctgcccaggctggagtgcagtggtgcaatcttggctcactgcaacctccacctcccaggttcaagcaattcccctgcctcagccttctgattagctgggactacaggtgcctgccaccacgcctggctaattttggaatttttagtagagatgtggtttcaccatcttggcctggctggtcttgaacacctgaactcaggtgatctgcccacctcagcctcccaaagggctgggattacaggtgtaatggttaaggaggcaaatcttaaataaaggccgggcacagtggctcacgcctgtaatcccagctactcgggaggctgaggcaggagaattgcttgaacccgggattgcagtgagccaagatcgcaccactacacttcagcctgggtgacagaatgagactccgtcttaaaaaaaaaaaaaaaaaaatttaaataaaatgcatgcaatgtggtccaggcgtggtggtgcatgcctgtaaccccagcactttgggagatagaggcaggtggatcccttgagcttaggaatttgagactaggctgggcaacatagtgagacctcatctctaaaattaaaaaaataaaagccaccagaaaaaaacctaaaaacatgccaagtgacatcagtctttgatgaaaatggcagcagaagagtgatgccatgggtgggggtgggaaatgctatttcagcagagagggagctgtcatggaagacaccatgtggctgggcacggtggctcacacctgtaatcccaacacgttgggaggccaaggtgggcagatcacttgaggtcaggagttcaagaccagcctggccaacatggcaaaaccccatctctactaaaatccaaaaattagtcgggtatggcagtgcacgcctgtaatcccagatactcggaaggctgaggcaggagaatcatttgaacctgggaagtggaggttgcagtgagccaagatcgtgtcactgcactctagcctaggtgataaagcgagactcagtctcaaaaaataaaggaagaaaaagaaaccaggtgactgttgtgcccgtctcttgtccccgatctttctcccaatcctgaggtccatcagctggaaggacatatccatccggaggcctccccaagtgtggtggg

SEQ ID NO: 252 - DNA, 14426 bp, Homo sapiens
ggactgcgtttttttttccgaacgcccgcagcagggtcagaagggaggtggtcgccctccgtcgtggtctggcgtgtattccgagcgttggtgtctggcggtttccgagcgttggtgtctggcggtttctgaccgttggtgtctggcggtttccgaccgttggtgtctggcacgcgccaccctctcttgctttggttgcgccatgccgatgtaccaggtaaagccctatcacggggtctgcgcccctctccgtgtggagcccacctgcatgtactggctccccaacatgcacggcaggagcggcggcccagcacttggcactggccacttgcaggtaggagcgcggggccccccgcccactgcgcacgcgcggcggccgggtgctggcccgggtgcccctaggccggatagagtgcgtcccaaccgattcgcggccccaccccggcatctgtgccggccggccaggggctcacccagatttttatgttttaaaagatttattcaggccgggcgccgtggctcacgcctgtaatcccggcactttgggaggccgaggcgggcggatcacctgagatcaggagttcgagaccagtctggccaacatggtgaaaccccgtgtctactaaaaatgcaaaaattagccgggcgtgtgtcgggcgcctgtaatcgcagctactcgggaggctgaggcaggagaatggtttgaaccctggaggcggagcttgcagtgagctgagatcgagccattgcactcgagcctgggcagcaagagtgaaactccgtctcaaaaaaaaaaattattatatacatatatatctttatatatattaaatatacctttattatgcgtattatacatattgtatattatgtgtaatatatgacataatatattataaaatatattatatattatatatatatatattttttttcctggtcgagcgcggtggttcacgcctggaatctcagcgctttgggagaccgaagcgggaggattgcttgggagaccgaagcgggaggattgcttgagcccggagagtttgagaccaccctgagcaacatagcaagacccttgtctctatgttttttttttttttttgagttggagtcttgctctgtcgcccaggctggaatgcagtggcctgatctcggctcactgcaagctccacctcccgggttcacgccattctcctgcctcagcctccccagtagctgggactacaggcgcccgccaccacgcctggctaactttattttgtatttttagtagagacatggtttcaccgtgttagccaggatggtctcgatctcttgacctcgtgattcgcctgcctcggcctcccaaattgctgggattacaggcgtgagccaccacgcccagctgccttgtctctattttttaaatgttttaattaaaataaaaatctatccatatttttttttttttttgcgtatggctgcttaaacattttagttcagaattctatcctctgaaaagtgaatagcacataaatgctcattttgaggaattacaaagcgaaccccagggtcaccacctcctaggttgacacacattgtcaccgctccattctttccacttaaaccttccccaccagcaccccagggcctgatttttgtggtaattatgtcatgcttgtctctattattttgtcagctaagtatccctaaacaatatggtcaggttttttgtttgtttgttttttttgtttttttcagacggagtttcactctgtcacccaggctggagtgcagtggcatgatctcagctcactgccaccttggcctcctgggttcaagcaattctcaggcctcagcctcatgagtagctgagattacaggcactgtccactgcacctggctaatttttgtatttttagtagagacggggttttgccatgttgaccaggctggtcttgaactcctgacctcaggcgatccgcccgccttgaactcccaaagtgctggattacaggtgtgagccaccgtgcccggcacctaaacaacatagttttgatataggtaagcatacagcatatattttgatgtatttcaggtaatttagtctaagaacaggaaaggacagaaaatgaacacaatttgtagttctttgttcttaacaaactaagaatactttgcttaaataagtagcaatgagaatgtaactcagtaattcatacaaatagacaagaagacaagaaaatgatttgaggacagcttcaatcgcggtgtgaagaagaaagcagcaaaacgaccactgaaaacaacgccggtgagtcagccagttttcttttgtttttgaatcttgtgggggaatcagcccagttattcgggaggctgaggcaggagaatggcacgaaccctgggggcagagctggcagtgagccgagatcacgccactgcacgccagcctgggcgacagagcgagactccgtctcaaaaaaaagagaaaacctaagaggttcaggtgatatggttcaaaaaaggacaagatttacaaagtattaagggacggaaataggaagaagagaaatttcgaagagaaaagaaaagaaaaggatgtttggttatagagatacgggaaggagactcaaggaattttttttttaaagggaaaaaagttaataaacttcataatataaaaatcaattatttcaggactgagtctaactcagactgctgtggaattggcagcataagcctacttgtgtgataatgatgaaaccaagtgttaatgtcactgttacctttttttcatatttctgatctttttatgtgtatcaggtggcaaaatatccaaagaaagggtcccaagcggtacatcgtcatagccggaaacagtcagagccaccagccaatgatattttcaatgctgcgaaagctgccaaaagtgacatgcaggtaaaagcagtgtcttacctctgttgataccatctcactttttgtaaggtggtaaggacaagtgtctacaaacttgatttgatgtgaacattttagtgagtgtaacatatcaagaaagataagattatggggtgaatccttggagtgatagaaggtaaccttgaataagagagcatgttcttttttttttttttttttttttttgagacagttgcccaggctggagtgcagtggcacagtctcagctcactgcagcctctgcctcctgggttcaagcgattctcatggtcttgggaggctgaggcctcccaagtagctgggcttacaggcatgtgccaccatgcctagctaatttttgtatttttagtagagatggggtttcaccatgtcggccaggctggtctccaactcctgacctcaggtgatccgcctgcctcggcctcccaaagtgctgggattacaggtgtgagccaccgcacccggcttcgagagagcgtttcttttcttaaagcgtgttcttttcttaaaggtatcacaggagtgattatgcctttattgattgatggagcagatgaggagaggcattgcatgacatgggaaggaagcttagatgtgggtggcaccttgttcacccatgttattttttagctccatcttgacaattatacttaattattttttccctctctgtttctttttttataattttattgaagttctaatatctggaagtgtacaaagcgtatatgtagtttaaaaaataaaaatgagatatcacccagatctctagccccagctcaagaaatgaaacattaatagtgctgtagagatcctttgtgtaccttctttctaccctacctcacagtccccttattacccataggtaaacactagggtgaactttgcgttaatctttctcatctttcattatagtgttaccactatgaatgtgttctttaattatgtaaatgaatccattattcaggcttctgtgatttaattatttcagttaagattgtttgagatttatccacattaacatgtagttttatagtttctgggaaaatatttaaaattttcaaacatacagaattttgctagttatattttcgttatttgatttctaactttattgtgttgtagtcagggaatgtggtgtttgaaatttatgtaggggctaggcacagtggctcacatctgtgatcccagcacttggggaggctgaggcaggcagatcacttgaggccaggagttcgagaccagcctggccaacatggcgaaaccccatctctactaaaaatacaaaaattagctgcatgtggtggcatttgtctgtaatcccagccacttgggaggctgaggcatgagaattgcttgaacccaggaggtggaggttgcagtgagctgagattgtgccacggcactccagcctgggtgacagagtgatactctgtctcaaaaaaaaaaaaaaaaaaaaaaaagacatttatggagacttagccttatggcctagtattgagttggcacaatcgttttatcttttctgtttctttttccccctttgcttgctttcctctggatttcttatcttctacaaggacctgagcacattttaattccagttgtcttttccaccttacatgcagtagtacagtgtgttagttttttatttgaaacggagtcttgctctgtcaccaggctggagtgcagtgacgcgatcttggctcactgcacctccgcctcccgggttcaggcgattctcctgcctcagcctgccaagtagctgggactacaggcacccgccaccatgcttggctaatttttggccaccatgcccagcctgaatgaactttcaaaattggtttttaaaagaggtatggaggccgggtgcagtggctcacacctgtaactccagcactttgggaggccaagacgggcagatcacttgaggtcaggagttcgagaccagcctggccaacatggtgaaaccccatctctactaaaaatacaaaaaggtagctgggcgtggtggtgcacctgtaatcccagctactcaggaggctgaggcaggagaatcacttgaacccgagaggtagaggttgcagtgagctgagattgtgccgctgcactccagcctgggcaacaggtggagtggagaattaggctgtacaaggctggtgtttaactattttatggtttggtaacagaaagaaaatatttactaactgggtatggcacatttttgtagtcctagctacttgagaggccaaagtgggaagatgacttgaacccaggagttcaaggccagcttgggcaacacagcaagagaccccatcccttaaaaaaaagagaaaaaatatttacatgtattttactatatatatagtatttacatcgggaggaagaaatgaaaggcatggggtacatggcatttcaagaaaataaattcttccatgagagggagttaactggtaggatggaaagtgagtttggagagagggtggctctaagagtcgacttatctgtctgtgtctagggatgtccttcctgagatccgtgctatctgcattgaggaaattgggtgttggatgcaaagctacagcacgtctttcctcaccgacagctatttaaaatatattggttggactctgcatgataaggtgggattcgagtcagtttccctttccgtttccttcatctttttcctgtcctaggacacttcaccttttcctgggcctgccactgagatattttacctagtgaccaatgattaacccatcaaggcgctgaaccttgaaactccgctagcactggggagggtaggataaggtagagagagacatacccaggagatgaaatgactcaaaacatgaggtacggggagagagactttccaatggaagagagttattgatggatggtaatgcaggtgctaaggggcagccaaaggatccttctcatcatgagtactgctgtgatccttttttttttttaagtatgaagacagctgttcattgtttctgacatctcagagtcctcagtagaggggacacccaagctagaatgagggatcggagaggggagtctggacgctcagtaggggcgagtagagtgtggttggtcttatttccattctcttggttttccctcctcaccagcaccgagaagtccgcgtgaagtgcgtgaaggctctgaaagggctgtacggtaaccgggacctgaccgcacgccttcactggccgcttcaaggtgagacgggtggtgctccttggcttggctctttgtcgtggttcccgtttccccaccttgtatctttctacccttcatgctctaagatgtcttggctatcccagcatctgcctctacgtaggcactctctttaggaggctctgattctaagagaacagaatatttggaatgggcgtaatgagatattgagtgactttctcctttctgcaggactggatggtttccatgatcgtggacagagagtacagtgtggcagtggaggccgtcagattactgatacttatccttaagtgagtcctgggaagaggggaggccagtgtctcagacctttgcccttccagggtcatctccctccacctgtcacagctgactcttccatctgtgcaggttgactgaggtcattcctgagttgcagtatgttgagagggtaatatttctgtcttctctaactccccatactcccttgtcttccactctccacttaggagttttttgtgagttatgtccttgttgcttttgcctctttttctttctagccttgattgtgccagaagacaatgtccctattcacacactctttctgcttttctgtgggcaggaacatggaaggggtgctgatggacgtggactgtgagagcgtctaccccattgtgtaggcctctaattgaggcctggcctctgctgtgggtgaatttctgtactggaagtgagtggggctccttttacgtttctttaacaccaccctctcggtttctctcccacatgtgctgctgccctacttaaggcctccccatctccgtggaagtctctctgctgtctcttttcctctctcagctccttggggctttccttagctctgcacctccttttcctttatcatctccttgggccatctcctccgtctgtggtcatgattacacctccttgtttcctcctgtgctgagccctttccttgtgtccattccaccagacttttctaccctgagtgcgagataagaacgatgggtggaagagagcaacgccagagcccaggcgcccagaggactttcttccagcttctgctgtccttctttgtggagagcaaggtgacatacacagagagaactctggctgttgtgcataggacctacaagtgggctggggttggtggctcacgcctgtaagcccagcactttgggaggctgaggtgggaggatcctttgagcccaggagtttgagaccagcttgggcaacatagtgagaccctgtctctaccaaaaaaaaaaaaaaaaaaagacaaatggagaaggatgggggtgtacactgtaggaaggagagcgatatttaatcagtaaccacttcctagggtattttaacatgccatcactaaatccccatgcacctccttccccagctccacgaccacgctgcttacttagtagacaacctgtgggactgtgcagggactcagctgaaggactgggagggtctgacaagcctgctgctggagaaggaccagagcacgtgccacatggagccagggccagggaccttccacctcctagggtgaaaccaggagagattgcttgcttcacttgtacaaggcaggaacggtggcatggggtgggggaaacttggagttggaaggtggctaatctttgattctatgtttttgatcctcctggcactccagacctgggtgatgtgcaggagagcacactgatagaaatccttgtgtccagtgcccagcaactcctgcctcagcctcccgagcagctgggactacaggtgcccgccaccacgcccggctaacttttttgtatttttagtagagacgggttttcaccgtgttagccaggatggtcttgatctcttgaccttgtgatccacctgcctcatcatcccaaagtgctgggattacaggcgtgagccactgcgcccagcatgttagacaatttttaattcatcctctctgtgctgttgttttctcagctgtgaaaggaatattctggtggggacaaggttacagagttgctgagagggtctcatgacatgaaggtactggccttggcacagtgcctgggggggcggggactccgcacatgcctgtgatgtcacagttactgtcagttcacagcgaaccttccctccttttcctgttgactttcccacactcctgtaaccgtccctccctcccttcttcctctctctctcactcacgcacacgcacacacacacacacacactccattcactgtctccatgactctggagtaaactaacgtctcgagttgccattggaagccccattgtcctcattttgttttgttttgtttgtttgagacggggtctcgctctgtcccccaggctggagtgcagtggtgcgatctcagcccactgcagcctctgcctcctaggttcaagcgattctcctgcctcaccctcctgagaagctgtgatcataggtgcccgccaccacacccgactaatttttgtgttttttagtagagacagggtttcactatgttggccaggctggtctcgaactcctgacctcaggtgatccgcccaccttggcctcccaaagtgctgggattacaggagtgagccaccacgcccagcctccgttgtcctcatttagactttcctgggttataggcacttttgacttcctggggtccttcttcagttaaaaaaaaaaattagaaaattaggccgggcgtggtggcatatgcctgtaatcccagcactttatgaggccgaggtgggaggatcacctgaggtcgggagttcaagaccagcctgaccaatgtggagaaaccctgtctctactaaaaatagaaaattatttgggtgtggtggtgcatgcctgtaatcccagctactcaggaggctgaggcaggagaatcgcttgaacccgggaggtggaggttgcggtcagccgagatcgtgccactgcactccagcctaggcaacaagagtgaaactctgtcttaaaaaaaaaaatttaaaaattatattcgggccgggcttggtggctcaatcctataataccagcaccttaggaggccaaggcaggaggatcacttgaggccaggagttcaagaccggcctgggcaacataatgagaacccatctttaccaaaaaaataaaattacattaaaaattagctgggcacggtgacgtctgcctgaggtcacattcaagaagctgatgtgggaggatcgcttgagcccaggaattggaggctacagtgagctaagatcataccactgcacttcagcctgggcgtcagagtgagaccctgtttctaaaataataataattttaaaaaatgatatttatggttgcattgggaaaagatcaatctattaatatatgtgaagacatttttggcctaaaagttatatatattttttccttctgattttaaaagaaatgaggccaggcatgatagctcatacctgtaatcccagcactttgggaggcccaggttggtggatcacctgaggtcaggagttcgagaccagcctggccaacatggtgaaaccccgtctctactaaaaatacaaaaattacccgggcgtggtgtcacacgcctctaatcccagctactcaggagactaaggcaggagaatcgcttgaacccaggaagcgaaggttgcagtgagaccagatcgcatcattgtactccagcctgggcgacaagaacaaaactctgtctccaaaacaataacaacagcaaaacaaatgaataaaactcattatattcatttgcttttatttatttatatttaactttattattattattattattttgagacagagtctcattctatcacccaggctggagtgcaatgaggcgatctcacctcatgcaacctccatctcccgggttcaagcgattctcctgtctcctcccaggtagctggggttacaggtgtgcagcaccacacctggctaatttttttatttttagtggagattgggtttcatcatgttggccaggctggtctcgaaagcctgacctcaagtgatccgcccaccttagcctcccaaagtgtggggagccactgtcccggcgtattattacttttagagacgaggtcttgctttgttttccaggctggagtacagtggctcaatcatagctcactgcagcctcaaactcctggccttaagcaatcctcctacttcagcctcccaaagtgctgagattataggtgtgagccactgcacctggcctctctattctctacttcctctttctagaatttctattaggcggatgttgaatctcctgaattaatctctaattttcttcccttccctttcccttctccttcccttcccttccccttctctcccctcccctcccctcccttcccctcccctcccctcccttcccttccctccttcctttctctctctctttctctctttctttcttttatagtctcattctgtcacccaggctggagtgcagtggcagttctcagctcaccgaaacctctgcctcccgggctcaagcaattctcatgtctcagcctcccgagtagctgggattacgggtgcacaccaccacacctggctgatttatgtatttttttcgtagagacagggttttgccatgttggccgggctggtctcgaactcctgacctcgggtgatccacccacctcagcctcccaaagtgctgggattacaggtgtgagccaccgtgcccggccttgactaccatattttaaatttactggaggacttttttgttctcttcttttttctttttttaatagcatcccgctcttatttcagaataaaaaaatttttaaggtatgttgagtaagaatctatagagcaatgaaaatgcaagagcaatagctatgggcaccaaatggtcaatcttcttatcataatgttgagtggaagaagccaggtccaccagacacatgctgctcatttatgcaaagtttggacacaggcaaaacaaaactagtttgatcgtgatgggaaacattagagaaatgcaaagacatgaccatcataattgtcaggagaaggcattggttaggattgggaagcggcaagcagaagcatttagggattggctggcaatgttttacttctcagctgagtgagggttgcatcggtgtttatttgataacacgttctaggggctgggcaagatggctcatgtttgtagtctcagtactttgggaggccaaagatgggaggattgcttgagcccgtgagtttgagaccagcgtgggtgacatagcgagaccctgtctctacaaaaaattaaaaaaaaaaaaaaaaaccagctgcgtgtggtggcacagcctcaaactcctgggctcaagcgatcctcccttggccttccagccactcaggaggctggggtgggaggatcgcttgaacccaggagtttgaggctgcagtgagctatgaatgagccactgcactccagcctgggcaacagggcaagaccctgtctcaaaaaaaaaaaaatttaatttgaacacttctgttttgtgcagttttctctgttatattttactttttaaaaagaaaaagcagctgggcgcggtggctcacgcctgtaatcccagcactttgggaggccaaagtgggtagatcacctgatgtcaggagttcgagaccagcctgaccaacatggagaaacctcgtctctactaaaaacacaaaaaattagccgggcgtggtggcgcatgcctgtaatcccagctacttgggaggctgaggcaggagaatcgcttgaacctaggaggcagaggttgcagtgagctgagatcgcaccactgcaccccagcctgggcaataagagtgaaactccatctcaaaaaaaaaaaaaaaaaggtacatgaaacatatgaagcaaaaagtgaaagtccccattcttttcctttttccagaggtgatttttgtggccaatctggtttcattccctcccagacacttttctaggcatctatgtgcctctattcacatataaacaaaataggagttttcctgtgcttcccttaaatggcatatgtatctttcactcttttttttcacctagtggatctttaataccttaaaagctcaacctgggcttggtgcggtggctcatacgtgtaatcccaggcctttgggaggccaaggtgggaggatcacttgagctcaggagttccagaccattccaaagcaaaaacaaaaggattttgagatcagtgtggacaacttagcaaaacaccatctctaaaaaaaaaaaaaaaaaaaattagccaagcttggtggtgtaagcctgtagtcccagctacttgagaggctgaggtgggaggattgtttgaacccaggaggttgaggctacagtgagctgtgattgtgccactgcactccaggttgggtaatgcagcgagactgcgtctcaaaaaataaataaaataaaaaataaataaaagctccacctgtcttccttttagatgttgcatagcatttcacacagtattgatgtattacagctcaactaaattaatcccagtatctagcacttggggtggtgggaaggattaagggagataatataagccaagtgcccagaacaagggcttggcacaccaggctcgccttgaacaatttgtttttttgttgttttgtgtgtgtgtggttttttttttttgagacagcgtctcattgcatcaccgaggttgtagtgcagtggtgcaatcgtagctcactactgtctcagacacctgggatcaagcgatcctcccacctcagcctccggagtagctgggactacacatgcatcaccacaccccactaatttttaaattttttgtagagacagagtctcattatgttgcctaggctggtctcaaactcctggcctcaattaatcctcctcccttggcctcccaaagtgctgggattacagggatgagccactgtacctggcagccttgagcgatttctcacctcctcattggcccagtttccttatctgtaaatgagagtagctgtaaaatatggttaatgtgaggaccaaacaggtcaattagggaaaagcagtgtctctgccagcacctgacacttcttttttttttttttgtgagacagtctcactctgctgcccaggctggagtgcagtggtgcaatcttggctcactgcaacctccacctcccaggttcaagcaattcccctgcctcagccttctgattagctgggactacaggtgcctgctaccacgcctggctaattttggaatttttagtagagatgtggtttcaccatcttggcctggctggtcttgaacacctgaactcaggtgatctgcccacctcagcctcccaaagggctgggattacaggtgtaatggttaaggaggcaaatcttaaataaaggccgggcacagtggctcacgcctgtaatcccagctactcgggaggctgaggtaggagaattgcttgaacccgggattgcagtgagccaagatcgcaccactacacttcagcctgggtgacagaatgagactccgtcttaaaaaaaaaaaaaaaaaatttaaataaaatgcatgcaatgtggtccaggcgtggtggtgcatgcctgtaaccccagcactttgggagatagaggcaggtggatcccttgagcttaggaatttgagactaggctgggcaacatagtgagacctcatctctaaaattaaaaaaataaaagccaccagaaaaaaacctaaaaacatgccaagtgacatcagtctttgatgaaaatggcagcagaagagtgatgccatgggtgggggtgggaaatgctatttcagcagagagggagctgtcacggaagacaccatgtggctgggcacggtggctcacacctgtaatcccaacacgttgggaggccaaggtgggcagatcacttgaggtcaggagttcaagaccagcctggccaacatggcaaaaccccatctctactaaaatccaaaaattagtcgggtatggcagtgcacgcctgtaatcccagatactcagaaggctgaggcaggagaatcatttgaacctgggaagtggaggttgcagtgagccaagatcgtgtcactgcactctagcctaggtgatacagcgagactcagtctcaaaaaataaaggaagaaaaagaaaccaggtgactgttgtgcccgtctcttgtccccgatctttctcccaatcctgaggtccatcagctggaaggacatatccatccggaggcctccccaagtgtggtggg

SEQ ID NO: 253 - DNA, 14451 bp, Homo sapiens
ggactgcgttttttttccgaacgcccgcagcagggtcagaagggaggtggtcgccctccgtcgtggtctggcgtgtattccgagcgttggtgtctggcggtttccgagcgttggtgtctggcggtttccgaccgttggtgtctggcggtttccgaccgttggtgtctggcacgcgccaccctctcttgctttggttgcgccatgccgatgtaccaggtaaagccctatcacggggtctgcgcccctctccgtgtggagcccacctgcatgtactggctccccaacatgcacggcaggagcggcggcccagcacttggcactggccacttgcaggtaggagcgcggggccccccgcccactgcgcacgcgcggcggccgggtgctggcccgggtgcccctaggccggatagagtgcgtcccaaccgattcgcggccccaccccggcatctgtgccggccggccaggggctcacccagatttttatgttttaaaagatttattcaggccgggcgccgtggctcacgcctgtaatcccggcactttgggaggccgaggcgggcggatcacctgagatcaggagttcgagaccagtctggccaacatggtgaaaccccgtgtctactaaaaatgcaaaaattagccgggcgtgtgtcgggcgcctgtaatcgcagctactcgggaggctgaggcaggagaatggtttgaaccctggaggcggagcttgcagtgagctgagatcgagccattgcactcgagcctgggcagcaagagtgaaactccgtctcaaaaaaaaaaattattatatacatatatatctttatatatattaaatatacctttattatgcgtattatacatattgtatattatgtgtaatatatgacataatatattataaaatatattatatattatatatatatatattttttttcctggtcgagcgcggtggttcacgcctggaatctcagcgctttgggagaccgaagcgggaggattgcttgggagaccgaagcgggaggattgcttgagcccggagagtttgagaccaccctgagcaacatagcaagacccttgtctctatgttttttttttttttttgagttggagtcttgctctgtcgcccaggctggaatgcagtggcctgatctcggctcactgcaagctccacctcccgggttcacgccattctcctgcctcagcctccccagtagctgggactacaggcgcccgccaccacgcctggctaactttattttgtatttttagtagagacatggtttcaccgtgttagccaggatggtctcgatctcttgacctcgtgattcgcctgcctcggcctcccaaattgctgggattacaggcgtgagccaccacgcccagctgccttgtctctattttttaaatgttttaattaaaataaaaatctatccatatttttttttttttttgcgtatggctgcttaaacattttagttcagaattctatcctctgaaaagtgaatagcacataaatgctcattttgaggaattacaaagcgaaccccagggtcaccacctcctaggttgacacacattgtcaccgctccattctttccacttaaaccttccccaccagcaccccagggcctgatttttatggtaattatgtcatgcttgtctctattattttgtcagctaagtatccctaaacaatatggtcaggttttttgtttgtttgttttttttgtttttttcagacggagtttcactctgtcacccaggctggagtgcagtggcatgatctcagctcactgccaccttggcctcctgggttcaagcaattctcaggcctcagcctcatgagtagctgagattacaggcactgtccactgcacctggctaatttttgtatttttagtagagacggggttttgccatgttgaccaggctggtcttgaactcctgacctcaggcgatccgcccgccttgaactcccaaagtgctggattacaggtgtgagccaccgtgcccggcacctaaacaacatagttttgatataggtaagcatacagcatatattttgatgtatttcaggtaatttagtctaagaacaggaaaggacagaaaatgaacacaatttgtagttctttgttcttaacaaactaagaatactttgcttaaataagtagcaatgagaatgtaactcagtaattcatacaaatagacaagaagacaagaaaatgatttgaggacagcttcaatcgcggtgtgaagaagaaagcagcaaaacgaccactgaaaacaacgccggtgagtcagccagttttcttttgtttttgaatcttgtgggggaatcagcccagttattcgggaggctgaggcaggagaatggcacgaaccccgggggcagagctggcagtgagccgagatcacgccactgcacgccagcctgggcgacagagcgagactccgtctcaaaaaaaagagaaaacctaagaggttcaggtgatatggttcaaaaaaggacaagatttacaaagtattaagggacggaaataggaagaagagaaatttcgaagagaaaagaaaagaaaaggatgtttggttatagagatacgggaaggagactcaaggaattttttttttaaagggaaaaaagttaataaacttcataatataaaaatcaattatttcaggactgagtctaactcagactgctgtggaattggcagcataagcctacttgtgtgataatgatgaaaccaagtgttaatgtcactgttacctttttttcatatttctgatctttttatgtgtatcaggtggcaaaatatccaaagaaagggtcccaagcggtacatcgtcatagccggaaacagtcagagccaccagccaatgatattttcaatgctgcgaaagctgccaaaagtgacatgcaggtaaaagcagtgtcttacctctgttgataccatctcactttttgtaaggtggtaaggacaagtgtctacaaacttgatttgatgtgaacattttagtgagtgtaacatatcaagaaagataagattatggggtgaatccttggagtgatagaaggtaaccttgaataagagagcatgttctttttttttttttttttttttttgagacagtctctttctgttgcccaggctggagtgcagtggcacagtctcagctcactgcagcctctgcctcctgggttcaagcgattctcatggtcttgggaggctgaggcctcccaagtagctgggcttacaggcatgtgccaccatgcctagctaatttttgtatttttagtagagatggggtttcaccatgtcggccaggctggtctccaactcctgacctcaggtgatccgcctgcctcggcctcccaaagtgctgggattacaggtgtgagccaccgcacccggcttcgagagagcgtttcttttcttaaagcgtgttcttttcttaaaggtatcacaggagtgattatgcctttattgattgatggagcagatgaggagaggcattgcatgacatgggaaggaagcttagatgtgggtggcaccttgttcacccgtgttattttttagctccatcttgacaattatacttaattattttttccctctctgtttctttttttataattttattgaagttctaatatctgaaagtgtacaaagcgtatatgtagtttaaaaaataaaaatgagatatcacccagatctctagccccagctcaagaaatgaaacattaatagtgctgtagagatcctttgtgtaccttctttctaccctacctcacagtccccttattacccataggtaaacactagggtgaactttgtgttaatctttctcatctttcattatagtgttaccactatgaatgtgttctttaattatgtaaatgaatccattattcaggcttctgtgatttaattatttcagttaagattgtttgagatttatccacattaacatgtagttttatagtttctgggaaaatatttaaaattttcaaacatacagaattttgctagttatattttcgttatttgatttctaactttattgtgttgtagtcagggaatgtggtgtttgaaatttatgtaggggctgggcacagtggctcacatctgtgatcccagcacttggggaggctgaggcaggcagatcacttgaggccaggagttcgagaccagcctggccaacatggcgaaaccccatctctactaaaaatacacaaattagctgcatgtggtggcatttgtctgtaatcccagccacttgggaggctgaggcatgagaattgcttgaacccaggaggtggaggttgcagtgagctgagattgtgccacggcactccagcctgggtgacagagtgatactctgtctcaaaaaaaaaaaaaaaaaaaaaagacatttatggagacttagccttatggcctagtattgagttggcacaatcattttatcttttctgtttctttttccccctttgcttgctttcctctggatttcttatcttctacaaggacctgaacacattttaattccagttgtcttttccaccttacatgcagtagtacagtgtgttagttttttatttgaaacggagtcttgctctgtcaccaggctggagtgcagtgacgcgatcttggctcactgcacctccgcctcccgggttcaggcgattctcctgcctcagcctgccaagtagctgggactacaggcacccgccaccatgcttggctaatttttggccaccatgcccagcctgaatgaactttcaaaattggtttttaaaagaggtatggaggccgggtgcagtggctcacacctgtaactccagcactttgggaggccaagacgggcagatcacttgaggtcaggagttcgagaccagcctggccaacatggtgaaaccccatctctactaaaaatacaaaaaggtagctgggcgtggtggtgcacctgtaatcccagctactcaggaggctgaggcaggagaatcacttgaacccgagaggtagaggttgcagtgagctgagattgtgccgctgcactccagcctgggcaacaggtggagtggagaattaggctgtacaaggctggtgtttaactattttatggtttggtaacagaaagaaaatatttactaactgggtatggcacatttttgtagtcctagctacttgagaggccaaagtgggaagatgacttgaacccaggagttcaaggccagcttgggcaacacagcaagagaccccatcccttaaaaaaaagagaaaaaatatttacatgtattttactatatatatagtatttacatcgggaggaagaaatgaaaggcatggggtacatggcatttcaagaaaataaattcttccatgagagggagttaactggtaggatggaaagtgagtttggagagagggtggctctaagagtcgacttatctgtctgtgtctagggatgtccttcctgagatccgtgctatctgcattgaggaaattgggtgttggatgcaaagctacagcacgtctttcctcaccgacagctatttaaaatatattggttggactctgcatgataaggtgggattcgagtcagtttccctttccgtttccttcatctttttcctgtcctaggacacttcaccttttcctgggcctgccactgagatattttacctagtgaccaatgattaacccatcaaggcgctgaaccttgaaactccgctagcactggggagggtaggataaggtagagagagacatacccaggagatgaaatgactcaaaacatgaggtacggggagagagactttccaatggaagagatttattgatggatggtaatgcaggtgctaaggggcagccaaaggatccttctcatcatgagtactgctgtgatccttttttttttttaagtatgaagacagctgttcattgtttctgacatctcagagtcctcagtagaggggacacccaagctagaatgagggatcggagaggggagtctggacgctcagtaggggcgagtagagtgtggttggtcttatttccattctcttggttttccctcctcaccagcaccgagaagtccgcgtgaagtgcgtgaaggctctgaaagggctgtacggtaaccgggacctgaccgcacgcctggagctcttcactggccgcttcaaggtgagacgggtggtgctccttggcttggctctttgtcgtggttcccgtttccccaccttgtatctttctacccttcatgctctaagatgtcttggctatcccagcatctgcctctacgtaggcactctctttaggaggctctgattctaagagaacagaatatttggaatgggcgtaatgagatattgagtgactttctcctttctgcaggactggatggtttccatgatcgtggacagagagtacagtgtggcagtggaggccgtcagattactgatacttatccttaagtgagtcctgggaagaggggaggccagtgtctcagacctttgcccttccagggtcatctccctccacctgtcacagctgactcttccatctgtgcaggttgactgaggtcattcctgagttgcagtatgttgagagggtaatatttctgtcttctctaactccccatactcccttgtcttccactctccacttaggagttttttgtgagttatgtccttgttgcttttgcctctttttctttctagccttgattgtgccagaagacaatgtccctattcacacactctttctgcttttctgtgggcaggaacatggaaggggtgctgatggacgtggactgtgagagcgtctaccccattgtgtaggcctctaattgaggcctggcctctgctgtgggtgaatttctgtactggaagtgagtggggctccttttacgtttctttaacaccaccctctcggtttctctcccacatgtgctgctgccctacttaaggcctccccatctccgtggaagtctctctggtgtctcttttcctctctcagctccttggggctttccttagctctgcacctccttttcctttatcatctccttgggccatctcctccgtctgtggtcatgattacacctccttgtttcctcctgtgctgagccctttccttgtgtccattccaccagacttttctaccctgagtgcgagataagaacgatgggtggaagagagcaacgccagagcccaggcgcccagaggactttcttccagcttctgctgtccttctttgtggagagcaaggtgacatacacagagagaactctggctgttgtgcataggacctacaagtgggctggggttggtggctcacgcctgtaagcccagcactttgggaggctgaggtgggaggatcctttgagcccaggagtttgagaccagcttgggcaacatagtgagaccctgtctctaccaaaaaaaaaaaaaaaaaagacaaatggagaaggatgggggtgtacactgtaggaaggagagcgatatttaatcagtaaccacttcctagggtattttaacatgccatcactaaatccccatgcacctccttccccagctccacgaccacgctgcttacttagtagacaacctgtgggactgtgcagggactcagctgaaggactgggagggtctgacaagcctgctgctggagaaggaccagagcacgtgccacatggagccagggccagggaccttccacctcctagggtgaaaccaggagagattgcttgcttcacttgtacaaggcaggaacggtggcatggcgtgggggaaacttggagttggaaggtggctaatctttgattctatgtttttgatcctcctggcactccagacctgggtgatatgcaggagagcacactgatagaaatccttgtgtccagtgcccagcaactcctgcctcagcctcccgagcagctgggactacaggtgcccgccaccacgcccggctaacttttttgtatttttagtagagacgggttttcaccgtgttagccaggatggtcttgatctcttgaccttgtgatccacctgcctcatcatcccaaagtgctgggattacaggcgtgagccactgcgcccagcatgttagacaatttttaattcatcctctctgtgctgttgttttctcagctgtgaaaggaatattctggtggggacaaggttacagagttgctgagagggtctcatgacatgaaggtactggccttggcacagtgcctgggggggcggggactccgcacatgcctgtgatgtcacagttactgtcagttcacagcgaaccttccctccttttcctgttgactttcccacactcctgtaaccatccctccctcccttcttcctctctctctctctcactcacgcacacgcacacacacacacacacactccattcactgtctccatgactctggagtaaactaacgtctcgagttgccattggaagccccattgtcctcattttgttttgttttgtttgtttgagacggggtctcgctctgtcccccaggctggagtgcagtggtgcgatctcagcccactgcagcctctgcctcctaggttcaagcgattctcctgcctcaccctcctgagaagctgtgatcataggtgcccgccaccacacccgactaatttttgtgttttttagtagagacagggtttcactatgttggccaggctggtctcgaactcctgacctcaggtgatccgcccaccttggcctcccaaagtgctgggattacaggagtgagccaccacgcccagcctccgttgtcctcatttagactttcctgggttataggcacttttgacttcctggggtccttcttcagttaaaaaaaaaaattagaaaattaggccgggcgtggtggcacatgcctgtaatcccagcactttatgaggccgaggtgggaggatcacctgaggtcgggagttcaagaccagcctgaccaatgtggagaaaccctgtctctactaaaaatagaaaattatttgggtgtggtggtgcatgcctgtaatcccagctactcaggaggctgaggcaggagaatcgcttgaacccgggaggtggaggttgcggtcagccgagatcgtgccactgcactccagcctaggcaacaagagtgaaactctgtcttaaaaaaaaaaaattaaaaattatattcgggccgggcttggtggctcaatcctataataccagcaccttaggaggccaaggcaggaggatcacttgaggccaggagttcaagaccggcctgggcaacataatgagaacccatctttaccaaaaaaataaaattacattaaaaattagctgggcacggtgacgtctgcctgaggtcacattcaagaagctgatgtgggaggatcgcttgagcccaggaattggaggctgcagtgagctaagatcataccactgcacttcagcctgggcgtcagagtgagaccctgtttctaaaataataataattttaaaaaatgatatttatggttgcattgggaaaagatcaatctattaatatatgtgaagacatttttggcctaaaagttatatatattttttccttctgattttaaaagaaatgaggccaggcatgatagctcatacctgtaatcccagcactttgggaggcccaggttggtggatcacctgaggtcaggagttcgagaccagcctggccaacatggtgaaaccccgtctctactaaaaatacaaaaattacccgggcgtggtgtcacacgcctctaatcccagctactcaggagactaaggcaggagaatcgcttgaacccaggaagcgaaggttgcagtgagaccagatcgcatcattgtactccagcctgggcgacaagaacaaaactctgtctccaaaacaataacaacagcaaaacaaatgaataaaactcattatattcatttgcttttatttatttatatttaactttattattattattattattttgagacagagtctcattctatcacccaggctggagtgcaatgaggcgatctcacctcatgcaacctccatctcccgggttcaagcgattctcctgtctcctcccaggtagctggggttacaggtgtgcagcaccacacctggctaatttttttatttttagtggagattgggtttcatcatgttggccaggctggtctcgaaagcctgacctcaagtgatccgcccaccttagcctcccaaagtgtggggagccactgtcccggcatattattacttttagagacgaggtcttgctttgttttccaggctggagtacagtggctcaatcatagctcactgcagcctcaaactcctggcctcaagcaatcctcctacttcagcctcccaaagtgctgagattataggtgtgagccactgcacctggcctctctattctctacttcctctttctagaatttctattaggcggatgttgaatctcctgaattaatctctaattttcttcccttccctttcccttctccttcccttcccttccccttctctcccctcccctcccctcccttcccctcccctcccctcccttcccttccctccttcctttctctctctctctctctctttctttcttttatagtctcattctgtcacccaggctggagtgcagtggcagttctcagctcaccgaaacctctgcctcccgggctcaagcaattctcatgtctcagcctcccgagtagctgggattacgggtgcacaccaccacacctggctgatttatgtatttttttcggagagacagggttttgccatgttggccgggctggtctcgaactcctgacctcgggtgatccacccacctcagcctcccaaagtgctgggattacaggtgtgagccactgtgcccggccttgactaccatattttaaatttactggaggacttttttgttctcttcttttttctttttttaatagcatcccgctcttatttcagaataaaaaaatttttaaggtatgttgagtaagaatctatagagcaatgaaaatgcaagagcaatagctatgggcaccaaatggtcaatcttcttatcataatgttgagtggaagaagccaggtccaccagacacatgctgctcatttatccaaagtttggacacaggcaaaacaaaactagtttgatcgtgatgggaaacattagagaaatgcaaagacatgaccatcataattgtcaggagaaggcattggttaggattgggaagcggcaagcagaagcatttagggattggctggcaatgttttacttctcagctgagtgagggttgcatcggtgtttatttgataacacgttctaggggctgggcaagatggctcatgtttgtagtctcagtactttgggaggccaaagatgggaggattgcttgagcccgtgagtttgagaccagcgtgggtgacatagcgagaccctgtctctacaaaaaattaaaaaaaaaaaaaaaaaccagctgcgtgtggtggcacagcctcaaactcctgggctcaagcgatcctcccttggccttccagccactcaggaggctggggtgggaggatcgcttgaacccaggagtttgaggctgcagtgagctatgaatgagccactgcactccagcctgggcaacagggcaagaccctgtctcaaaaaaaaaaaaatttaatttgaacacttctgttttgtgcagttttctctgttatattttactttttaaaaagaaaaagcagctgggcgcggtggctcacgcctgtaatcccagcactttgggaggccaaggtgggtagatcacctgatgtcaggagttcgagaccagcctgaccaacatggagaaacctcgtctctactaaaaacacaaaaaattagccgggcgtggtggcgcatgcctgtaatcccagctacttgggaggctgaggcaggagaatcgcttgaacctaggaggcagaggttgcagtgagctgagatcgcaccactgcaccccagcctgggcaataagagtgaaactccatctcaaaaaaaaaaaaaaaaaggtacatgaaacatatgaagcaaaaagtgaaagtccccattcttttcctttttccagaggtgatttttgtggccaatctggtttcattccctcccagacacttttctaggcatctatgtgcctctattcacatataaacaaaataggagttttcctgtgcttcccttaaatggcatatgtatctttcactcttttttttcacctagtggatctttaataccttaaaagctcaacctgggcttggtgcggtggctcatacgtgtaatcccaggcctttgggaggccaaggtgggaggatcacttgagctcaggagttccagaccattccaaagcaaaaacaaaaggattttgagatcagtgtggacaacttagcaaaacaccatctctaaaaaaaaaaaaaaaaaaaaaaattagccaagcttggtggtgtaagcctgtagtcccagctacttgagaggctgaggtgggaggattgtttgaacccaggaggttgaggctacagtgagctgtgattgtgccactgcactccaggttgggtaatgcagcgagactgcgtctcaaaaaataaataaaataaaaaataaataaaagctccacctgtcttccttttagatgttgcatagcatttcacacagtattgatgtattacagctcaactaaattaatcccagtatctagcacttggggtggtgggaaggattaagggagataatataagccaagtgcccagaacaagggcttggcacaccaggctcgccttgaacaatttgtttttttgttgttttgtgtgtgtgtggttttttttttttgagacagcgtctcattgcatcaccgaggttgtagtgcagtggtgcaatcgtagctcactactgtctcagacacctgggatcaagcgatcctcccacctcagcctccggagtagctgggactacacatgcatcaccacaccccactaatttttaaattttttgtagagacagagtctcattatgttgcctatgctggtctcaaactcctggcctcaattaatcctcctcccttgggccccccaaagtgctgggattacagggatgaaccactgtacctggcacgccttgatcgatttctcacctcctcattggcccagtttccttatctgtcaatgagagtagctgtaaaatatggttaatgtgaggaccaaacaggtcaattagggaaaagcagtgtctctgccagcacctgacacttcttttttttttttttgtgagacagtctcattctgctgccccaggctggagcgcagtggtgcaatcttggctcactgcaacctccacctcccaggttcaagcaattcccctgcctcagccttctgattagctgggactacaggtgcctgccaccacgcctggctaattttggaatttttagtagagatgtggtttcaccatcttggcctggctggtcttgaacacctgaactcaggtgatctgcccacctcagcctcccaaagggctgggattacaggtgtaatggttaaggaggcaaatcttaaataaaggccgggcacagtggctcacgcctgtaatcccagctactcgggaggctgaggtaggagaattgcttgaacccgggattgcagtgagccaagatcgcaccactacacttcagcctgggtgacagaatgagactccgtcttaaaaaaaaaaaaaaaaaaaatttaaataaaatgcatgcaatgtggtccaggcgtggtggtgcatgcctgtaaccccagcactttgggagatagaggcaggtggatcccttgagcttaggaatttgagactaggctgggcaacatagtgagacctcatctctaaaattaaaaaaataaaagccaccagaaaaaaacctaaaaacatgccaagtgacatcagtctttgatgaaaatggcagcagaagagtgatgccatgggtgggggtgggaaatgctatttcagcagagagggagctgtcacggaagacaccatgtggctgggcacggtggctcacacctgtaatcccaacacgttgggaggccaaggtgggcagatcacttgaggtcaggagttcaagaccagcctggccaacatggcaaaaccccatctctactaaaatccaaaaattagtcgggtatggcagtgcacgcctgtaatcccagatactcagaaggctgaggcaggagaatcatttgaacctgggaagtggaggttgcagtgagccaagatcgtgtcactgcactctagcctaggtgatacagcgagactcagtctcaaaaaataaaggaagaaaaagaaaccaggtgactgttgtgcccgtctcttgtccccgatctttctcccaatcctgaggtccatcagctggaaggacatatccatccggaggcctccccaagtgtggtggg

SEQ ID NO: 254 - DNA, 166 bp, Homo sapiens
aaggagagcgatatttaatcagtaaccacttcctagggtattttaacatgccatcactaaatccccatgcacctccttccccagctccacgaccacgctgcttacttagtagacaacctgtgggactgtgcagggactcagctgaaggactgggagggtctgacaa

SEQ ID NO: 255 - DNA, 32190 bp, Homo sapiens
gagatgaagtttcgctcttgttgcccaggctggagtgcaatggcgagatctcagctcactgccacctcctcctcctcccaggttcaagtgattatcctgcctcagcctcccgagtagctgggattacaggcacccaacaccaaaccccgctgactttttgtatttttagtagagatggaatgtcaccatgttggccaggatggtcttgaacccctgacctctaatgatctacccgaattggtctcccaaaatgctgggattacaggcgtgagccactgtgcccagcccctcccatacctcttttggccaaggcagtacaattcagagaatcttgccagggaagactggtaaatggacatcaacatgatgcctatggctcctggtggatttagatacctcctggtgcttactgatacctttaccagttacatgggggcttttccatgccagactgaaaatgctggagatcactgatcaaccttcaactatttactagcagaacactgaggggactctgcagtcaccaatatctcctattgcacttggataaacacctcccgggaaatagagatgaatagaaaggaaatacttaaacaagcagaatggctacattccttcaaccagaagggtccattagtctgttttcacactgctataaagaactactggaaactggggaatttatgaagaaaagaggtttaattgactcacagttttgcaggctgtacaggaagcatggctggggagccctcaagaaactgacaatcacggcagaaggcgaaggggaagcaggcacgtttctggccatggtggagcaggagagacagagagagtgaagcaggaggtgctgcatgcttctaaacaaccagatcccatgagcgctcactcactatcacgagaccagcaagggggacgtcagccgccatgagccaatcatctcccaccaggtccctccctcaacactgggaattgcaattggacatgagatttggttggggatacagagctgaaccatatcaagggtagttcaaccactgagattgattgattgactgagatggggtcctgctctgttacctaggctggagtgcagtggcacaatctcggctcactgcaacctccgcctcccaggttcaagcaattctcctgcctcagcctccctagtagctgggactacagcacacgccaccacacctggctaatttttgtattttcagtagagacggggtttcaccatgtttgcccggctggtcttgaactcctgacctcgtgatcaccctgcctcggctcttcttttgctggaattacaggcgtgagccaccgcacccggacaaccactgagatttagaaggcagtcgagtccactataccacacctcacctggtttcttcctctgttggggcccctcgtggccactgttctgttactttttggtcctatttatttaaatggatggtgagctgtttgtcctccaggatccaacacttccaccttcagcttgtattacaacaataccagcctttcaagctactccgggtgaccccagaactcatctgaactcagaagcccaagagtttcattcctctcactttaggggactaagtgcccctggtcagcatgaagtcgatacagaagcatgacctccatccctaatccctcaagaatgaggagtggaaggtgttggcaggagggtgggacgcggtttgtaaatctgtaactgcatcagaccaaatctagttcaactttttttttttttgatggagtttcactcttgtcacccaggctggagtgcagtggcacgatctcagctcactgcaacctccacgtcctaggttcaagcattctgctgcctcagcctctggggtagctgggattacaagggtgcgccaccacgcctggctaatatttatatttttagtagagacggggtttcaccattttggccaggctggtcttgaactcctcgacctcaggtgatccacctgccttggcctcccaaagtgctgggattacaggcgtgagtcaccgcacccgaatcagttcaacttttatgtaatgaagttgtcagttgttttccaattgccatcgacctgcaggttgaaggtcatgtaccctgtgcatgcccaggttaaccacgcgtgccaccgtggagtggaacctaagagctcagcctgaagagctcggaccgatttaagaaccagacacccccaggcaggagccaggatccaatcagattgagttttggtgtcaccccatggcaggatccagtcagatcacacctcccagcattactttattgcaagatccaatcaaatcacacctcattaccctatgcttataaaacctgacacagcccccagctgtgtaagggagatttgagtacttcctcctgtgttcttgctggctgacttacaaaaaagctttaaaaaaaaaagccaggcgtggtggctcacgcctgtaatcccagcactttgggaggctgaggtgggcagatcacttgaggtcaggggtgcaagaccagcctggccaacatggtgaaaccccatctctactaaaaatacaaaaattagctgggtgtggtgacacacacctataatcccagctacttgggaggctgaggtaggagaatcacttgaacccaggaggcggaggttgcagtgagccaagatcacaccactgcactccagcctgggcgacagagtgagaagactccgtctaaaaaaaaaagttaaaattagcaccaaacgctttacaagtaaaaaaagtttttagctgcatatgtttaagtaactttttagattataagaaatacgcatgcaaaatggaaaggcacaaagaagagagcaaaaagtgcatgagatctcacatccaaggataaccgctgagaacatggaagtgctgactcttcagtctttatactatacacatttaggcctgttttgtttttataaaactgtaatcatataatacagacagttttataatctgctttttaaacacaacaattatgtaacatttagctgtttcatttgcattcaaattcataagggttccagtaactcatttatcagaaaaccaagagaaatattctcataaaaatataagtacataaggtcaggcatggtggctcacgcctgtaatcccagcactttgagaggccgaggtgggcggatcacctgagggcaggaattcaagaccagcctggccagcctggacaacatggtggaaccccgtctccactgaaaatacaaaaattagccgggcgtggtggcgcgcgcctgtaatggtagctactcagaaggctgaagcaggagaatcgcttgaacttggcaggtggaggttgcagtgaactgagatcgcgccactgcactgcagccagggcgccaaagtgagactccatctcaaaaaaagataaaaataaaaaataaaaaaaatgtatatatatgtatatatatttttccagacagggtcttactctgtctcacagtctgaagtgtagtgacgcaatcatagctcactgcagtctcaagttcctgggctcaggtgatcctcccacttcagcctcccaagtagctggaactacaggtgcatgccaccatgcccagtcaattttttttttaatttttcatagagacagagtctcactatgtttcccagtcctaataaacattatgtgataaaaagaaaaaagtaaatcatcctgaagttaagtctttaatgagaaatgcaaataaagcatttctcaataaattatgggaagagaatcaactgaagaataaacatctttagtaaatcttttgctcatgtgcattaaccaatactcttgaaaaccaggattaatttactgtaccttcttaatattcctttgaaattccttatggcgcacaggtagcgtagaaaataactgcttcacgctgactgtggtccctctggggtgggggtagggggttttctggatgattttcccatcgtgatcaaacaccagtcgagtcccaaccttcgccgatacgtggcaggtagaaatggtgacatcactgtgagagaataccaggcatggtgtgttcagtgagagatccatgatgttgggcactgactactcttttcttcacttgcttttctctcaaaattttcttaaaaagctgatgatccctctgagataaccgagatctaaacggttgaggagtcatcacaaaatctaaggtctggcatctaaaagacagtgagacagagagcactaaacatgctttgttttgataaaagctttgacttcatttttcaggttgaattgcaaaaccataaatgatctcaagatttattgattctcaaatagagatttgttttgttattactcttcaaacaaaattttttaaaagaatttttttaaagaattttttaaaatttttaaaattttttttaaagaatccaaaagatattataattaaaatgtatatgtagggcagggtgcggtggctcgtgcctgtaattccagcactttgggaggccaaggagggcagatcacttgaggcctggagttccagaccagcctgggcaacatggcaaaaccccatctctactaaaaatacaaaaattagccaggagtggtggtgcacgctatagtcccagctcttcaggaggctgagtcacgaaagtcacttgaacctgggaggcagagactgcagtgagctgagactgtgccactgcactccagcctgggtgacagagtgcgactctgtctaaaaaaaaaaaaaatatatatatatacatatatatgtatatatatatgtatatatatatgtatatatatgtatatatgtatatatatgtatatatgtatatatgtatatatatatgtatatatgtatatatgtatatatgtatatatgtatatatatgtatatatgtatatgtatgtatatatatatgtatatatatgtatatatatgtatatatatgtctatatatgtgtgtgtgcatgtaattatttataaaaatttagtatctgtgctgtaattaaatagtgctttggtgaaatgtttccctaaaaattgataatgaaaaccaatggtaactatcatttattatctatatgttatgttcaaattgagaagttactgttttaataagggtaaccaattttttaaagaatactatttgcttcatttcattcatttattgctcacatttcagaagtactaggacttagattggcagtgagacaaaacagaattcagaagctagaagctgagatattgagatagaaaattgtaaataataatgattccaattaattttcagagaggtttttctaaggggtcaagtgaatggataaaaatattttctcacctcagtgcacaaagtgagctcagagctttcccctgaaagccaaaagtttcaacccgagttaggtcggcaaactctcgaatcttagatgtgtgatgtttcagagctgaaagagactgtaaagtaaggactaagatatctcaagtgctataacaacaaatatacatgatatctagtaactggctttaaaaaactgtttttgtgtttcccaagacagtgttactcaaaattctaagacatgtggcccaattattttgtaataggattagaaagttaacttacttaagccttcgaagttttcttcttctaccccacatccattgcctgaaacttcaatgagatccattccatagtccttaagctttagatctagaaagtttaaaatatttatatatttattaaaaatggacccacgctatcagtttttatattgatattatttataacgtgcaaatttaagtgtcgtaactatacctttagttaaacatactagtgtcattttgtatatttcatttttataaagttctttctggccatttactagcccagattaaatagtttagcattttctttctttcctcttttttttttccttacactagtcaagtgaagcagttggagtggagaaggaacaaaaaaatctgtaactggttgtgatcaattagttgtaaagaccgttgcactttgaccagccttttcctttgaaagaaataattttaacatacccagtaaggagaacgggggccgggcgcagtggttcatgcctgtaatcccagcactttgggagaccaaagcgagcggatcacctgaggtcagtagttcgagaccagcctgaccaacgtagagaaactctatctctactaaaaatacaaaattagccaggcgtggtggtgcatgcctgtaatcccagctacttgtgaggctgaggcaggagaatcgcttgaacctgggaggtggaggttgcagtgagttgagatcgtgccattgcaccgcagcctcggcaacaagagcaaaactctatctcaaaaaaaaaaaaaagaaaaaaaaacagaactggttctggaatcagacttcctagattctattttattagctttataatctcaaaaaaaggaaatttactgtcccttaatttcctcaactgtaaaatggaggtaataagttctatctcataaagttatttggcagattaataatttttttttaattttgtcattttcttttttttcttccctttttttttttttttttaattttttgagatggacttttgctcttgtcacccaggctggaatgcagtggcacaatcgatcttggctcactgcaacctccacctcccaggtttaagcaattctcctccctcagccttctgaggagctgagagtacagccatgcaccatcacatctggctaatttttgtatttttagtagagacagggttttaccacgttggttaggctggtcttgaactcctgacctcaaagcatcagcccccctcagcctcccaaagtgctgggattacagatgtgagccactactccaggatttattttattttattttattttatttttttgagacagagtcttgctctgtccccaggctggcgtgcagtggcacaatctcggttcactgcaacctccacctcccaaatttaaacaattctcattcctgagcctccccagtagctgggattacaggcttctgccaccaggtctggctaatttttgtatttttagtagagacagagtttcaccattttggacaggctggtctcgaattcctgacctcaggtatccacccgccttggcctcccaaagtgctgggattacaggcgtgagccaccacacccggcctgctttattttttaatagagacgaggtctccccatgttggccaggttggtcttgaactcttggcttcaagcaatccccccacctcagcctctcaaagggctaggattacaggcgtcagacaccacgcccagctattctgcaaattaaatgagatatttctgtgcaattcttagcataacacctgcctggcacaccataagaacacaagaaaagctgtcgttattattattactacctagctaagtactaggcacataataggtgctaactttaacttaaaaataatagtttattactacatcaacacttgatagtcttatttcaataacaaatgtttcttgactacaacaacattcactgatcatttcttgtggcttaaaactctcccaaacttaccaatattagtggcaccagcatccagactgtttcctactatcttcttcaccgcagtgcttagactcagtaccaccggcccagagcaaatctgatggactgacttccgatcaataggtttgatggccttagcaggttctgtactaaagaaatcagttacaagaaacaaagcaggtattcagctatatattttcatcctgattttaactgtgggaaatgactcaacactgcaaatagtttatgggtctaatctattcatttattatattaacaaatacatttattatatccagaaatggaaacattgttttacaatccttaaacaagtacccaaaatacttctggatagacacttcaaattcaacacatccttactatctagtatccacatggagaaaacatacattgtatctctcaaattaccaaaatctttggcaataatggtgtcttctttcttgaaaactgaaagcatggccggtgcggtggctcatgcctgtaatcccagcaatttgggacacagaggcaggtggatcacttgagatcaggagtttgagaccagcctggccaacgtcgtgaaaccctgtctctaccaaaaatacaaaaaattagccaggcatggtggtgggcgcctgtaatcccagctacttgggaggctgaggcagaagaatcacttaaacctgggaggcggaggttgcagtgagctgagattgcagcattgcaccctaggctgggcaatgagcaaaaaaaaaagtaaaagcaacataatttcccacataattagaaaaaccaacagtatgctgggaaatacacaatgtttaagtcaaaatcatctcagaaattggataccagttatataactattccttatacacagttgcctttgataccctactccaaattgaagctgccagctgctgtcttagcaaagaccctcaaagttcttgctgtacttgttttaagaggtttttttttttttttttttttttttgagacggattcttgctctgtcgccctgtcgcccaggctggagtgcagtggcacgatcttagctcactgcaagctctgcctcccgggttcacaccattctcctgcctcagcctcctgagtggctgggactacaggcgcccaccaccatgcccagctaattttttgtatttttagtagagacagggttccaccgttttagccaggatggtctcgatctcctgacttcgtgatccgcccgcctcagcctcccaaagtgctgggattacaggcgtgagccaccatgcccagcccactttaagagttttataacggtttcatttccccttattccctgctccaacccatcctccactctatcaccagagctatttttgaaatcacgaatctggtcaaataatttttctgcttgaaaaattactagtgccccacttcctactatatgaaacttaaaatctagtcatcactgggccccaaactaccttcttttcagaatctctctgatcctttcccttcatcaagtcccctacattattattattattattattattattattattattgacagagtctcaccctgtcacctgggctagagtgcaatggcatgatctcggctcactgcaacctccacctcccaagttcaagtgattctcctgtctcagcctcccaagttgctgggattataggcatccaccattacactcagctaatttttgtgtttttagtagagatggggtttcaccatgttggccaggctggtttctaactcctgacctcaggtgatctgcccgccttggccttccaaagcactaggattacaggtgtgagccaccgcaactggccgtcccctatattgcagcacagtgaacaactgtttcctgaacatcacaagctctcttagacactacagtgtataagcaggtctctgtctaaactgctctcctcttgcccctctgcccaaccaatgtctgctcatccaaagaatgtatcccgtgtgttcattaacttagcaagttcccagtaaacagtttaattgatcactcgttaagagaaggcgggaaacctccatgaaaagagaaatcagtgggtatttcctacagcatttaacacatcgtaggccttcaataaacccttgtgaaataaacaaacctctttactcttcattctatgttgctaagaatctcacctaagtctgtctaccatgtgaaactgcagatgacctcacagaaaatggaaagaagtatctctaaaaataagtttatttggcaacacactacaggctacaggttcacttctgattttttttctttttttttttttgagatggagtcttgctgtgtttacccaagacatgttttagactgtaaattggaggctgaaaaacatcataacatcacttttgccctactcaatgactatcctgttactaaggttgggccaaaattaaagggggggtcataggcccccacctctttttttattttcagacagggtctccctccgctgtccaggctggagtgcaggggcgcaatcatagctcactgcagccttgacctcccaggctcaagcaatcctcctgcttcagcctcccaagtagctgggacatgggcatgcatcatcacagctggctaattaaaaacatttttttgttgagacggagtctcgctctgttgtccaggctggagtggagtggtgcgctctcggctcactgcaacctctgcctcctgggttcaagcaattctcctgcctcagcctcctgagtacctgggattacaggtgcccaacaccacacctggctaattttttgtattttagtagagacaggatttcaccatgttgcccaggctggtctcaaactcctcagctcaggcaacccgcctgccttggcctcccaaagtgctaggattacaggcatgagtgaccatgcccagcctaaaaacttttttttaagggatgggatcttgctaggctgcccaggctggtcttgaagtcctggcctcaagcaatcctcccaccttggcctcccaaagttctaggattacaggcgtgagccaccatgcctggctgatcctcacctatttttttgttgttgtttgagacagggtctatctccatctcctcggctggagtgcagtggcttgatcatggctcactccagcctcaacctcctgggctcaagcaatgctaccacttcagcctcccgagtggctgcgactacaggtgtgcaccaccacaccctgctaatttgtgtattttttgtagagatgaggtcttgctatgttgcccaggctagtttcaaactcctggcctcagtcaatcctcccaccttggcctcccaaagtgctgggattataggtgtgagccaccacctctggccagctcccacctgttgatcaaaggagcatcaaagaatttgcagcctccagaaggaggtcatttcctgcctctgagtctcagtttccacatctatgaaataaagttaatgatccttcactccagggttgtcgtgaaggctaaattaagttgtatttggaaaaatatgtggggcacagtaggtgtgtttctcacacccagagtcagagtgtttagcagagggttagtagttgcctccagggcatgaagggctcttcctgaccctaagtgtgaggaacgctttgggttaaaagattgtacttttctgcgttcagctgaaaggtggagggctcagtgaggtggctcacacctgtaattccaatgctttgggaggccgaggtgggaggatcacttgagcccaggagtttgagagcagcttaaacaacacagtaagaccttgtttctacacacacacacacacacacacacacacacacattagccaggcgtggtggcatgcgcctgtagttccagctacttgggaggctgaggtgggtggattgcttgaggcaaggagtttgagacaagcctggtcaacacagtgacaccccatcatcccccaaaatcatttttctttgttttaaggcagagcctcactctattgcccaggctggagtgcagtggtgtgatctcacctccttgcaacctctgcctcccgggttcaagcgattcttgtgtctcagcctcctgagtagctaggattacaggtgtgcaccaccatgcctggctaatttttgtatttttagcggagatggggttttgccatgttggtcaggctggtcttcaactcctggcctcaagtgatccgtctgccttggcctcccaaagtgctgggattacaggtgtgagccactgtgcccagccacaataaatcatttttaaaaggttaaatttaacctcatttaagtaatacatgtaagtctcatcgaatatttgaagccagtttgtgaggtaaagtctattattatgtgcattttaattcttagcgtttaattaaagcctcataagtacaaataaaaacaggacttgctataacaggttgccacctattttctttaaagatgacgagcagcatcttatttgcgttaacacaagtcatccacataacaaatatagataagaaaagtggccaggtgtggtggctcatgcctctaatcctagtactttgggaggccgaggcagacagatcacttgaggtcaggagttcgagaccagcctgggcaatatggtgaaaccccatctctatcaaaaatacaaatattagcccggcatggtggtgggcgcctgtaatcccagctacttgggaggctgaggcaggagaattgcttgaacctggaaggcgaagtttgcagtgagccaagatcatgccactgcactccagcctgggtgacagagcgagactctgtctcgaaaaaagaaaaaagaaaagaaaagaaaagtaaggcacttagagggtaagtggcttcactcggtactaagtaggggagtgtggatttgagccaagctgtgggttcaaaccacatcaacacctgctatgcctgactgcgtctccacgctgctgggaaggttgactgaatctgccactacctccctggggtgcatgtgcttaccaaaccattgcattatgtaaaaggcggtactgtaggtttttagttttttaatttttatttttttgagatagagtctcactctgtcacccaggctggagtgtagtggcatgatcttggctgactgcaatctctgccttccgggttcaagcgattctcttgcctcagcctcctgagtagctgggactacaggcccacaccaccacgcctggctaatttttgtatttttagtagagacagggtttcaccatgttggacatcatggtctcggtctcttgggctcattatctgcctgcctcggcctcccgaagtgctgggattacaggtgtgagccacagtgcctggcctctagtgacctcattttaacttgatcacctctgtaaagactctggttccaataaggtcacctctaaggtctggagggtcatggcttcaatacatgaattaggggtggggggcacaccatgcagcccataatactagcgtatctggttatgttaaacttgctatagccacagtcttgctgacttggattatggtgccatgggaagggcccttaaagatcatcttatctggttgggctcaatggctcacgcgtgtaattccagcactttgagaggccaaggcaagaggatcgcttgtgaccaagagttcaagaccagtctgggcaacagagcaagatgctatatctactacaggcatgcacctgtagtctcagctacttgggaggctgagagaagaggattgcttgagcccaggaggcaacagagagctgattgtaccactgcaccccagccgaggcaacagagagctgattgtaccactgcaccccagccaaggcaacagagaccttgtctctaaaaaacaaaaacaggccgggtgcagtgtcttatgcctgtattcccagcactttgagaggcagaggcgggtggatcatttgaagtcaggtgttcaagaccagcctggcaaacatgacgaaaccctaaaatacaaaaattagccgggagtggtggtgggtgcctgtaatctcagctactcgggaggctgaggcaggagaatcgcttgaacctgggaggcagaggttgcagtgagccgagatggagccactgcactgcagcctgggtgacaagagcaaaactctgtctcaaaatattaggaaaaaaaaagagagagagcctcttttccatctccccgccacagagttgtcttcagtaatttcattcccttttttcctgaggattcactgggtttctgggtcccagaggggaagttctcttcaaggtacagaaaccacgactccgcagagaaccgcagagaaccgcagagatggcagcatgaccagaccacggacaggtgtgtagaagctgctgggctgaaacttgggctgaacttccgctgcaggttgacttattcccatcagcaccaaagccgctggagggggtcatccactagcaaatgaagtgggggcacggattggaggctgtttcagaaggtcccactgagccacggactcaaggcctggccacagccctcccaagcgaggcccagatcatatttcaccacgctcagaaaaccttgccagctcatttcagtccacagtgactttgctttctttaggatctctcttgcactgtccaactcagagaatttcaaatctgaatggattccaatgatggagctaaatcaggcctcacctcagttttttaattacaatcaatagggctgggtcccagcatctgtgtcttaatgttcctccatgtgatcctcatgctgaaaggctggtatttgaaaatccctttttttggggagtgaagggtttttttagagacaggcctcactctgatgcccagcctggaatgcagtggtggatcacagctcactgcagcctcgaactcctggccgcaagaaatcctcccaccttagccaaccaaagtgttgggattgcaggagtgaccactgtgtccagccaggaaagcccttctgtttcacttgaatgatatttctgctgcagacctacagccattgttgtattaaacggcatcattgcaggaaaagaaaaggtgagaggtgactgttttgcttttttctgaacatatcagaccaaacctgggctgtctggcactttttttttttttttttttttgagtcggagtctcactctgtcgcccaggctggagtgtagtgtcgtgatctcggctcactggaacctccaccttcccggttcaagtgattctcctgcctcagccccacaagtagctgggattacagaagtgcactcccacgcccagctcattgtttctgtatttttacagaaaaacagacaggtttcaccatgttggccaggctgatctcaacctcctcacctctggttatctgtcggcatcagcttccaaaagtgctgggattacaagtgtgagctgccgcacctggtttgcccattttttgacaatgtatcaacatcatctaagatgggcactgcctcagtgtagtgtgtctagacaaggtggccggaacagagaggaatatgcataccaggcttaaagacgggttaaatcagagcttttcattccacaaaagagcaattttaatgaggtcagaacatggatgttctaatatttgaaagcctgttaactaggagagagagtaaagtgatttgttgtaggaggacacacccagctctgacggtttaaagcgtcatgaatgcaaatttgaactccagaaaagcagagcttcctaacaatgggacttccacagcaatgggatttccttccgcattcagtttgtgcctttcccatgagcgagagactcctaggagagccgcagcccgttaggaagccatgtgggaactcatccacaggttctttttgttttttttttttgttgtttttttttgagatgtagttttgctcttgttgcccaggctggagtgcaatggtgtgaccttggctcactgcaacctccgcctcccaagtttaagccattctgctgtccccgcctcctgagtggctgggattacaggcacccaccaccatgcctgactaattttttgtatttttagaagagatggggtttcaccatgttggccaggctgctcttaaactcctgacctcaagcgatccacctgctatggcctcccaaagcgctgggattacaggcgtgagccactgtgcctggccggaacccacaggttctttggatggtctctgaatgtcatgaaactcttttatatttaattaaaaaaatttttttgacacaaggtcttgctgtgttgcccagactggagtgcggtgtcacgatcacagctcactgcagcccctaactcctaggctcaagcaatcctcctgccacctcagtctctcaagttgttggaacacaggtgccagccacgacacctggctaattttgttttgttttgttttgttttgttttagagatgggctcttgctatgttgcctatactggtcttgaactgctggcctcaggcagtcttcctcccttggccacccaaagagatgggattacaagcatgagccactgtgcacagctgagatttttcgacttagtctttttgtacacccagtatcttatagaatatccataatatagattcataaataaaccatttccttcaatggtataaataaataaaccactgctataaatggtggaattttctgagttaagagcaatacatatgatacaaaacttgatatatagagtttcttagccaaactggaggggctggctttaggtgatccgtggactccctgaaattggggacaccattggaaatatgtgtgaactcatgggcagtttcctatgatttccagtcctcaaaatatctcttggactcaaagatgccttagggcagaggacgcgtgtacccccagtacagaatctcggacagtgaatgtcagtagacactcggcagaaaacctctgccaaattgagtgctctgatgtgactttttcatcaagtcaatgttcctgggatctcttgtacatgataatctcactcttgtaaggtttcatcgtttctgcttaccctacttttctttcccatcctgatccctctcccaccagactggactctgaaacgggcatgtacagagaagaggagaccccaacatgcttcaagctttgagtggagaggacacagcctctgctgggacagggaacagagggatgcggagaccctgaagatgcttttggacagtggtctgaggttgggacagtggcaggagataccattcacccaggatctccaggacaagagatcagcctggcagttacatgtgttttttttcaaactggttgccaggttggcatgagcgatgacatcagagattccgaccttcctgattggagggaccggactctgtcggcacctgggagttcagttggacaacagtaacttctcagagctgttctccactcctgacttctcccagcctcgagaattgataacacactcttctggatcccagcagtgtccagaagaagaccaaggacagaacagagactaggtttggtgagatgggacagattttgggaaagatcatgatgagccatcaaccgcagccccaggaagagcggagcccccagcggagcacctcagggtaccccctccaggaggtggtggatgatgaagtgtcgggaccatcaggtgaggggactggaggaagaagaggtggcataggattgactaagatgaaggaagggggccaggcgtggtggctcacccctgtaaccccaacactttgggaggctgaggcgggcagatcacctgaggtcaggagttcaagaccagcctggccaacatggtgaaaccccatctctactaaaagtacaaaaattagccaggcggtagtggtgtgtgcctataatcccagctacttgggaggctaagacaggagaatcacttgagcctgggaggaagaggttgcagtgagccgagatcgtgctactgcactccagtctgggtgacagagtgagatgctatctcaaaaaaaaaaaaaaaaaaaaaaaaaaaaaaaaaagaagaaaaaaaagaagggtcagaggtcaggaaggagaacctggggagggtgtgtgggaagaatggagaaattcaggctgggtgcagtggctcacacttgtaatcccagcactttgggaagccaaggcaggcggatcacttgaggccaggagtttgagaccagcctggccaacatggtgaaaccctgtctctattaaaagtacaaaatggagctgggcattatggcaggcacctgtaatcccagctacctgagaggctgaggcaggagaataactggaatccgggagatgcatgttgcagtgagctgagattgcaccactacactccagcctgggtgacaaagcaagattctgtctcgaaacaaaaaaaaaaaaaaaaaagagggactcagagagccagggaccagggaaggatatgaggcagtgttctgaggacagagagagggaagaatggggaggggaaggagtggcacatggggttgagcagaggagaaagtcagaaaggtggcttggagaagccagcagtctgcgaggctggggaggatggagagtggtttggggtttggggtcggggtctaacgtgatcagttgcagaagcattacacggtggcctggtttctttactcagcccctggggtagatcccagccccccacgtaggtcccttggctggaaaaggaagagggaatgtttggatgaatctgatgatgagccagagaaggagctcgcccctgagcctgaggagacctgggtggcggagacgctgtgtggcctcaagatgaaggcgaagcgacggcgagtgtcgctcgtgctccctgagtactacgaggccttcaacaggctgcttggtaggaggacaccccagagagcacctccaatcctgttctttctaaagaggaaacttccaataaccacacttttccaatgggaaaaatatgccccagtgggtgagctctccatgcgggaggactctgaagtgatcactcatgagggacacttaaggagacaacagaggattaggtagacttgataaaggtcggtgcttgggataagaaagcttggttttgggccaggcgctgtggctcccgcctgagatcccagcacgttgggaggctgaggcaagaggattgcttgaactcaggactttgaggctgcagtgagctatgactgcaccactgcactccagcctgggtgacagagcaaaactctgcgtcaaaagaaaaaccaaggctgggcacagtagctcatccctgtagttccagctactcgggaggctgagacaggagaactgcttaaacccaggaggcagaggttgcagtgagccaagatcaggccaatgcattccagcctggcccacagagcaagactctgtctcaaaataaattaataaataaataaaaataaaaatcaaataaagaaaaacaaaatcaaaaatcaaaaaagtggtttcagctgtgccctctgaaacttaatgtttcttactgacttttctaaacctaagtgtctccatccatagtgagggatcccaaggccatggtcacaccctgatgtgtgactgtctcatgaggaaatgatgggaattcctttatgactctgcagtggtccctccgtgtctgctggagggggtcctggctgattcccagctctacatcctgtagattctcacacccagggcctccttcggcctcttctcaggggagtctcagagcaggagcctctctcccttgcccagtgaaagtcattctcccctctctcatccacctcacccgcggccacaatcctgagactttcccccgggaggcacacttctcctcgctgccctgctgctctcacggaaaccctgtcctgcttctcacactgacatctgctctctaatcacagaggatcctgtcattaaaagactcctggcctgggacaaagatctgagggtgtcggacaaggtaaggttgttctctatgtaactgtgttcctgttctaacgcacggccagggggagggcgcagcttccaaacccacagttctccgtccaccacctcccaccagatgctcctacagtttttttttgtttttgtttttgtttttttttgtgagacacagtcttgctctgctgcccaggctggagggcagtgtctcgatcttgactcactgcagctgatgcctcctgggttcaagcgattctcccacctcagcctccaagcagctgggattacaaacatgaaccaccacgcctggctaatttttgtgtttttagtagagacggggttttgccatgttggccagattggtcccgaacacctgacctcaggtgatccacccgccttggcctcccaaagtgctgagattacagacgtcagcactgtgtctgaccagctcccatggtcttgagtcttggcacccacacattttttttttctgagacagagtccagctctgctccccaggatggagtacagtggcatgatcatagctcactctaattcctgggctcaagcaatcctctttccttagcctcctgaggagctgggactaggcacatgctaccatgctcaactaatttttgaaatcttcttagaaacagggtctcgctgtgttgcccaggttgttctccaactgttgggctcacatgatcctcctgtctccacctctcaaaaagtactgggatcacaggcttgagctgccactcccggctattctttgtctttttatgatttgtcagcatctccgtcaggattctgctggtctcttgcagagtgaatgagtggcccctgcctctcctatgggtcctttgggatctgagccctgggccacagtctggctgcagccctgaagctcctgggccctctactctcagctccttgggacagttctctgcctggcacacaaaagaccctcctgacaccagccgacctagacacaccccctccaaagatcccatcggagcccaccatcctgggagcatcaccaaaaacccttcctccggcttctcggatttgcatccgaccttcgaatacccctccaccccgcaatttccacatgagcacagtcaccccaacactgaggtcccttctctgatgggcaacccctccccagacccccattccactatatccacaatcttcctctcccaagatgtgaactctccctctctgtgttcctttctctccatcagtatctcctggctatggtcatagcgtatttcagccgggccggcctcccctcctggcaataccaacgcattcatttcttcctggctctgtgagtggtttgctgcctcctatccgtcaatatccaatgccctgggacagcgggggaagtgggattccagcctttcatttattctttcacctatttgtcctctttactctgtgtacaaaaaagacaggattatagtctcaaaaaaaaaaaaaaaagaacaaaaaacaaaaggaaccatgaaccgctcctaaggggagaagaaaaggagcggaggagcggacatgacacttcccccagcaagcagacgtttccggttgttctctctccttcccacatcaaccgcaaaagccatcagcctcctccgggttcccgtgacagaggtcacagtccaggtcccccttgcatcactcgaatccactgtcaaatgctccctgctggggtttcctggagtctctccccaagccagggggcttcctagtgcagcctgaacatctttccaaagcacgacaacctcactgcccacctgaacaacttccttagctgatgtctttctctatcgaggccagggtccacagtgccaattccaccctctctacaatctctacaaccacactggctcgccatcttggtgtttcctggcttggcttcactgctccttccaaatgccctccacttgactttgcatttgtgttttctgtctgggtgtcccgcacacatgtggttctgaagggaaggacccattccttgaagtcggttcaccccacagcctctgtgatgccttccctcgtcttccaacttctgcatgcccgtagctctccagttacatcctattataatgtgacattgggattaggtcatctcccctgattactcccagtcccattagactagatgcctgtagaaggcagggtcctggcaaaatatcagtgtattcaattgctttttttttttttttgagacagacttgccctgtcccctaagctggagtgcagtggtgagatcatagctcaccgcagcctccatatcctgggctcaagcgatcctcccacctcagcctcttgattagctccgactacagggctgtaccaccacacctggacagttatttatttatttatttatttatcaagacaagagtgttgctgtgtctctcaggctggaatggaggggcccaatcttggctcactgcaacctccgcctcctgggttcacacaattcttatgcttcagcctcctgagtagctaggactaatgggtgtgccaccgcaccaggctgatttttgtatttttagtatagatggggtttctctgtgttgaccaggctggtctcaaactcctggtctcaagcaatccacctgcttcagccttccaaagcgctgggattacaggcatgagccaccacgtctggcgtattttttatatttttaatagagacgagggtcttgctatgttgcccaggcctgtctcaaactcctggcctcaagtgatcctcctgcttcggcctcccagtgtgctgggattccaggcataagccaccactcttggtcaccagttgggtttttgtctccatcctgaaggagtgggagacgcccttgatcaggtctctgtccagcagagccctcctgaggaaggcgtggctctctgcagggtgggtgccagtcctgagctagggacggtcccttaccttcctctctgagaagctgacctcagccggaggtctctcctggtggtgcccctgagcagcaacctgatttctgtcctcagctatctggccaatgacatggaggaggacgacgaggcccccaaacaaaacatcttctacttcctgtacgaggagacccgctctcatatacccttgctcagtgagctttggttccagttatgccgttacatgaacccgagggccaggaagaactgctctcagatagccttgttccggaagtatcggttccacttcttttgttccatgcgctgcagggcttgggtttccctggaggagttggaagaggtgggtggggcctggggacgtggaggatgtggggaggaatcgggtgggctggaggctggacgaggggagagaggggtatcctggggagtccccgtcttctcaaagcgcgtttgtttttccagatccaggcttatgacccagagcactgggtgtgggcgcgagatcgcgcccacctttcctagagctccagggaccgtggaggcctgaggtcatcggcctgagagaaggtacatctgcatcctccggggtaaaggcagaatattggggtctatttcggaaatccaaggaacccaattgcttgatctggcttcaagcctgggcaacgtggcgagatcccctctccacaaaaatacaaaaattagccaggcgatgtgggaggcatctctactcccaactactcaggaggctgaggcgggaggatcgctggagcctgggaggtcggggctgcagggagccctgatcctgccactgcactccagcccgggcgacagagtgagaccctgcctcaaaaataatcataaatactgagttcggggaggttcattatgattgatgcacttgagttaccgatttgggtcgagggttcagtgaagctttggtttacatcttgtgcagctaaccatgttgagcacagagcatgagacttcgtcatgaggagggaggattatggattaggcttctggactcgtggttcgtgatgctgtcacgttagaaacagatctagcacggttacaagtttagatctgaagtgacacaaaaggccccagctgtgatgaagtccaaagccacattctctgagggtgccctactccctgggaagacccacccaaagtcctggctatgaagcagatcactggggctgaccttgggtgtattaagttttggagtcagggtcaccaaagtgtgagtttcacagttgaacacgatggttcagaagcagggtatagaatgaaaggcaggagataaaattgcacttctcaattgctctgaactctagctagacttgacatgggacgtgaataaccttcctgtctagagagctgcctccttgaagtgtgacattgtctctctcacttccagaacaccggacccaggggagatgtggattttcagcaggaactttattccaatgctaatggcagacatcaggaaggaggagaggaaccattggtgcagatcatctagaagaacctggaccattcttgacagagctgaatacagtgatcacgttgtcctccaaggagcaggggtggggtggggtacttctaggagtccttggagaaaagtaagaaaccaggagtgtttccagttccaccctttcctgcggcaccacctccctttttatattgctgaatgccaacctccctggggcggaacctggaggtcctgtttcttatggacttggttgccacagtccaggagcatttgaaggcacagtgcaggggctcagattggcacagaattctttgtgaaatatgagtgccacagactgtaacagatagcttcatgcacactatgcattttattggtttgtttggaaaatgttggccattgaattattaataggtttatttcaaatagtttggaaattgttgtacttttgaaaacatgctgttcctgtagagttttttgatgagagttatagttgttatatatacctaaagataattttcttttcatttttaagtgagaattctttttatcctaaatcttttattatctttaaatttttttctgtattattatatgtgctcctgaagcgagcactctttttatctatgatacttccataataatctcttctatttatagctattggtagttccccaccagaaaaaaacataattctggtgatagaaatttttatttgctgtttaggtttgtgactgacttgtgagaattcagttgtgatttttaacatgtctcagatatatatactaacacgtctaatatatactatctattttattggtttattttgaaaaacatgggtatagaattatttaaatattattttatttactgaaatatttattaaatatatttatttatttaaatattattattactttaaatattattttaaatattttggaaatactggtatttttgaatagatgctgtttctataaagctgtgtgatgggtattataactgttgtatacacatacatataattttgttttcctttttaagagaggattcttttcatcctaaatcttttacctttcaatctttgtatctattattacacgtgctgctgaagggagcatggtttttatctatgatacttagttaacatatatattacatttatagctatgtggtagttcccctaaattcttgtaaaaataaatttttatttgatatttagtgtatgtttgaaatgtgagaattcagatggaattttttatcttgttttggcatgtttgtatgttactttaaagaggatgtgtgttctaaaggaggacatgagctgtgtgttttcaagagaacagtgcagtgcatctcttggggaaacataataaagatgaacttttctcaccttcacagtgagtgtgatcatattgtggtctggattgattatttgctgtcaagtgacatttttccttaatggggttgtggttatttgaacatatttgttagctttggaagataatcctgtgctgttttttatgtagaaaaaaacatacggctgggtgcagtgctcacacctacaatcccagcagttttggaggtcatggcgggaggatcacttgaagcctatttttaatttttattttttaaagaaaaacaacagaagagaaggctgatcccaagctacagggtttttttgtttgtttgtttgtttgtttgttttggagacagtctcgctctgtctcccaggctggagtgcagtggcacaacctcggctccctgcaactttcacctcggcgttcaagcaaattctcctgcctcagcctcccaagtagctgggactacaggcatccgcctgtacgtctgactaacttttgtaaaaatagtagagacaaggtttcaccatgttggccaggctggtctcaaactcctgacctcaagtgatccacccgcctcagtctcccaaagtgctgggattataggcatgagctactgtgcccagaccccaagctagagttttaaagcaggaaatgagagaaagatattgagagaggaaaaccaggtggtaagaaaactctaaaggtggctgggcgtggtggctcacgcctgtgatcccagcaggagttcgagaccaggcaggagaatcactagcagagaatatgtctccccaacccctctcaaaaaaaaaaaaaaaaaagtccaggcgcggtggctcaggactgtaatcccagcactttgggaggctgaggtgggtggatcatgaggtcaggagatcaagaccatcctggctaatacggtgaaaccccatctctgctaaaaatacaaaaaattagctgggtgcggtggcaggcgcctgtagtcccagctactccggaggctgaggcaggagaatggtgtgaacccaggaggcggagcctgcagtgagcagagatcgcgccactgcactccagcctgggtgaaagcgcgagactccatcacaaaagaaaaaaaaaaaaagaaagttcctgcaacagttcaagctgtgaaagacaggcactctgccatgcaattctttgtgatttttcttttttatttttggagtcggggtcttgtgctgtcacccagactggggtgcagtggtgcggtcatagctcactgtgggctcagactcaagctcaagcaatcttcttatcttgcctttctaattgctgggattataagcatgagccactgcacctggcctgtgtgacgtaattctgatgtcaactccctgatgttacatcaaatgccacaggttaaggccaccagcccccgctaggctgccctcgcttcagatgcagctgcaagcttgggtgtccacagaccgcatgtacttctcaccaactggctgcaaatttggaggttcccaccacgtcctcaggtttgataattcaccataacaacccacagaactctgaaaagcatgatactttctctttctttatttgagacagagtcttgctctgtcacccaggctggagtgcagtggccaccatgcttggctaattttagtatttgtattagagacagggtttcgccatgttggccaggctggtcttgaactcctgacctcaggtgatccacccaccttggcctcccaaagtgctgggattacaggcatagccactgtgcctggctgacttctagagtttcaataacagagatgtggttcaagaagaaaagggagacatgttttgtagacagcaggagcttcatgaaaagaagccaatgaagggcaggatgtgtagctgtctacctacaggaaaccagccaggagcctccccacagggacttcagcacagatggccgggaaaatctgcattcacctgagctctggacctaagagaggacaaggccttgactgtttctacagactcacaagatgcaatctctgcggtccatgcccgtggtgtgatctgggaaacagggggccttctaaatgccaacaacaaggaaatcaaatgtgcaacagacagaaatatcggcattgacacgggccatggagaggcctaaacagatgactgcagtccactgccaaggtcatcaaaggggtgactctgaaataagaaatttcagacgccacggcccaaatagctgcacgaggtggggaagtcctccacatgcctctgcttccttcagtacctcttcatgaaataagccgaggtacttccctggggaatttcctttctctttctttctttcgagacggagtcttgctctgtcgcccaggctagagtgcagtggcgcgatctcggctcactgcaacctctccctcccgggttttggcaattcttctgtctcagacttctgagtagctgagattacaggtgtgtgccaccatgcccagctaatatttgtattttcactcgagacagggtttcaccatctaggccaggctggtcttgaactcctgacctcatgatccacccatcttggcctcccaaagtcctgggattacaggcacgagccaccacacccagacttcttgttttattttttgagatgaagtttcgctcttgttgcccaggctggagtgcaatggcgagatctcagctcactgccacctcctcctcctcccaggttcaagtgattatcctgcctcagcctcccgagtagctgggattacaggcacccaacaccaaaccccgctgactttttgtatttttagtagagatggaatgtcaccatgttggccaggatggtcttgaacccctgacctctaatgatctacccgaattggtctcccaaaatgctgggattacaggcgtgagccactgtgcccagcccctcccatacctcttttggccaaggcagtacaattcagagaatcttgccagggaagactggtaaatggacatcaacatgatgcctatggctcctggtggatttagatacctcctggtgcttactgatacctttaccagttacatgggggcttttccatgccagactgaaaatgctggagatcactgatcaaccttcaactatttactagcagaacactgaggggactctgcagtcaccaatatctcctattgcacttggataaacacctcccgggaaatagagatgaatagaaaggaaatacttaaacaagcagaatggctacattccttcaaccagaagggtccattagtctgttttcacactgctataaagaactactggaaactggggaatttatgaagaaaagaggtttaattgactcacagttttgcaggctgtacaggaagcatggctggggagccctcaagaaactgacaatcacggcagaaggcgaaggggaagcaggcacgtttctggccatggtggagcaggagagacagagagagtgaagcaggaggtgctgcatgcttctaaacaaccagatcccatgagcgctcactatcacgagaccagcaagggggacgtcagccgccatgagccaatcatctcccaccaggtccctccctcaacactgggaattgcaattggacatgagatttggttggggatacagagctgaaccatatcaagggtagttcaaccactgagattgattgattgactgagatggggtcctgctctgttacctaggctggagtgcagtggcacaatctcggctcactgcaacctccgcctcccaggttcaagcaattctcctgcctcagcctccctagtagctgggactacagcacacgccaccacacctggctaatttttgtattttcagtagagacggggtttcaccatgtttgcccggctggtcttgaactcctgacctcgtgatcaccctgcctcggctcttcttttgctggaattacaggcgtgagccaccgcacccggacaaccactgagatttagaaggcagtcgagtccactataccacacctcacctggtttcttcctctattggggcccctcgtggccactgttctgttactttttggtcctatttatttaaatggatggtgagctgtttgtcctccaggatccaacacttccaccttcagcttgtattacaacaataccagcctttcaagctactccgggtgaccccagaactcatctgaactcagaagcccaagagtttcattcctctcactttaggggactaagtgcccctggtcagcatgaagtcgatacagaagcatgacctccatccctaatccctcaagaatgaggagtggaaggtgttggcaggagggtgggacgcggtttgtaaatctgtaactgcatcagaccaaatctagttcaactttttttttttttgatggagtttcactcttgtcacccaggctggagtgcaatggcacgatctcagctcactgcaacctccacgtcctaggttcaagcattctgctgcctcagcctctggggtagctgggattacaagggtgcgccaccacgcctggctaatatttatatttttagtagagacggggtttcaccattttggccaggctggtcttgaactcctcgacctcaggtgatccacctgccttggcctcccaaagtgctgggattacaggcgtgagtcaccgcacccgaatcagttcaacttttatgtaatgaagttgtcagttgttttccaattgccatcgacctgcaggttgaaggtcatgtaccctgtgcatgcccaggttaaccacgcgtgccaccgtggagtggaacctaagagctcagcctgaagagctcggaccgatttaagaaccagacacccccaggcaggagccaggatccaatcagattgagttttggtgtcaccccatggcaggatccagtcagatcacacctcccagcattactttattgcaagatccaatcaaatcacacctcattaccctatgcttataaaacctgacacagcccccagctgtgtaagggagatttgagtacttcctcctgtgttcttgctggctgacttacaaaaaagctttaaaaaaaaaagccaggcgtggtggctcacgcctgtaatcccagcactttgggaggctgaggtgggcagatcacttgaggtcaggggtgcaagaccagcctggccaacatggtgaaaccccatctctactaaaaatacaaaaattagctgggtgtggtgacacacacctataatcccagctacttgggaggctgaggtaggagaatcacttgaacccaggaggcggaggttgcagtgagccaagatcacaccactgcactccagcctgggcgacagagtgagaagactccgtctaaaaaaaaaagttaaaattagcaccaaacgctttacaagtaaaaaaagtttttagctgcatatgtttaagtaactttttagattataagaaatacgcatgcaaaatggaaaggcacaaagaagagagcaaaaagtgcatgagatctcacatccaaggataaccgctgagaacatggaagtgctgactcttcagtctttatactatacacatttaggcctgttttgtttttataaaactgtaatcatataatacagacagttttataatctgctttttaaacacaacaattatataacatttagctgtttcatttgcattcaaattcataagggttccagtaactcatttatcagaaaaccaagagaaatattctcataaaaatataagtacataaggtcaggcatggtggctcacgcctgtaatcccagcactttgagaggccgaggtgggcggatcacctgagggcaggaattcaagaccagcctggccagcctggacaacatggtggaaccccgtctccactgaaaatacaaaaattagccgggcgtggtggcgcgcgcctgtaatggtagctactcagaaggctgaagcaggagaatcgcttgaacttggcaggtggaggttgcagtgaactgagatcgcgccactgcactgcagccagggcgccaaagtgagactccatctcaaaaaaagataaaaataaaaaataaaaaaaatgtatatatatgtatatatatttttccagacagggtcttactctgtctcacagtctgaagtgtagtgacgcaatcatagctcactgcagtctcaagttcctgggctcaggtgatcctcccacttcagcctcccaagtagctggaactacaggtgcatgccaccatgcccagtcaattttttttttaatttttcatagagacagagtctcactatgtttcccagtcctaataaacattatgtgataaaaagaaaaaagtaaatcatcctgaagttaagtctttaatgagaaatgcaaataaagcatttctcaataaattatgggaagagaatcaactgaagaataaacatctttagtaaatcttttgctcatgtgcattaaccaatactcttgaaaaccaggattaatttactgtaccttcttaatattcctttgaaattccttatggcgcacaggtagcgtagaaaataactgcttcacgctgactgtggtccctctggggtgggggtagggggttttctggatgattttcccatcgtgatcaaacaccagtcgagtcccaaccttcgccgatacgtggcaggtagaaatggtgacatcactgtgagagaataccaggcatggtgtgttcagtgagagatccatgatgttgggcactgactactcttttcttcacttgcttttctctcaaaattttcttaaaaagctgatgatccctctgagataaccgagatctaaacggttgaggagtcatcacaaaatctaaggtctggcat

SEQ ID NO: 256 - DNA, 108 bp, Homo sapiens
cccaggctggagtgcagtggtgtgatcttggctcactgcaacctctgcctcccaggttcaagtgattctcctgcctcagcctcctgagtagctgggattacaggcgcc

SEQ ID NO: 257 - DNA, 207 bp, Homo sapiens
cccaggctggagtgcagtggtgtgatcttggctcactgcaacctctgcctcccaggttcaagtgattctcctgcctcagcctcctgagtagctgggattacaggcgcccaccaccaagtctggctaatttttgtgtttttagtagagatggggtttcaccttgttggccaggctggtctcgaactccttacctcaggtgatccaccc

SEQ ID NO: 258 - DNA, 23613 bp, Homo sapiens
tttagagatgggctcttgctatgttgcctatactggtcttgaactgctggcctcaggcagtcttcctcccttggccacccaaagagatgggattacaagcatgagccactgtgcacagctgagatttttcgacttagtctttttgtacacccagtatcttatagaatatccgtaatatagattcataaataaaccatttccttcaatggtataaataaataaaccactgctataaatggtggaattttctgagttaagagcaatacatatgatacaaaacttgatatatagagtttcttagccaaactggaggggctggctttaggtgatccgtggactccctgaaattggggacaccattggaaatatgtgtgaactcatgggcagtttcctatgatttccagtcctcaaagtatctcttggactcaaagatgccttagggcagaggacgcgtgtacccccagtacagaatctcggacagtgaatgtcagtagacattcggcagaaaacctctgccaaattgagtgctctgatgtgactttttcatcaagtcaatgttcctgggatctcttgtacatgataatctcactcttgtaaggtttcatcgtttctgcttaccctacttttctttcccatcctgatccctctcccaccagactggactctgaaacgggcatgtacagagaagaggagaccccaacacgcttcaagctttgagtggagaggacacagcctctgctgggacagggaacagagggatgcggagaccctgaagatgcttttggacagtggtctgaggttgggacagtggcaggagataccattcacccaggatctccaggacaagagatcagcctggcagttacatgtgttttttttcaaactggttgccaggttggcatgagcgatgacatcagagattccgaccttcctgattggagggaccggactctgtcggcacctgggagttcagttggacaacagtaacttctcagagctgttctccactcctgacttctcccagcctcgagaattgataacacactcttctggatcccagcagtgtccagaagaagaccaaggacagaacagagactaggtttggtgagatgggacagattttgggaaagatcatgatgagccatcaaccgcagccccaggaagagcagagcccccagcggagcacctcagggtaccccctccaggaggtggtggatgatgaagtgtcgggaccatcaggtgaggggactggaggaagaagaggtggcataggattgactaagatgaaggaagggggccaggcgtggtggctcacccctgtaaccccaacactttgggaggctgaggcgggcagatcacctgaggtcaggagttcaagaccagcctggccaacatggtgaaaccccatctctactaaaagtacaaaaattagccaggcggtagtggtgtgtgcctataatcccagctacttgggaggctaagacaggagaatcacttgagcctgggaggaagaggttgcagtgagccgagatcgtgctactgcactccagtctgggtgacagcgtgagatgctatctcaaaaaaaaaaaaaaaaaaaaaaaaaaaaaagaagaaaaaaaagaagggtcagaggtcaggaaggagaacctggggagggtgtgtgggaagaatggagaaattcaggctgggtgcagtggctcacacttgtaatcccagcactttgggaagccaaggcaggcggatcacttgaggccaggagtttgagaccagcctggccaacatggtgaaaccctgtctctattaaaagtacaaaatggagctgggcattatggcaggcacctgtaatcccagctacctgagaggctgaggcaggagaataactggaatccgggagatggatgttgcagtgagctgagattgcaccactacactccagcctgggtgacaaagcaagattctgtctcgaaacaaaaaaaaaaaaaaaagagggactcagagagccagggaccagggaaggatatgaggcagtgttctgaggacagagagagggaagaatggggaggggaaggagtggcacatggggttgagcagaggagaaagtcagaaaggtggcttggagaagccagcagtctgcgaggctggggaggatggagagtggtttggggtttggggtcggggtctaacgtgatcagttgcagaagcattacacggtggcctggtttctttactcagcccctggggtagatcccagccccccacgtaggtcccttggctggaaaaggaagagggaatgtttggatgaatctgatgatgagccagagaaggagctcgcccctgagcctgaggagacctgggtggcggagacgctgtgtggcctcaagatgaaggcgaagcgacggcgagtgtcgctcgtgctccctgagtactacgaggccttcaacaggctgcttggtaggaggacaccccagagagcacctccaatcctgttctttctaaagaggaaacttccaataaccacacttttccaatgggaaaaatatgccccagtgggtgagctctccatgcgggaggactctgaagtgatcactcatgagggacacttaaggagacaacagaggattaggtagacttgataaaggtcggtgcttgggataagaaagcttggttttgggccaggcgctgtggctcccgcctgagatcccagcacgttgggaggctgaggcaagaggattgcttgaactcaggactttgaggctgcagtgagctatgactgcaccactgcactccagcctgggtgacagagcaaaactctgcgtcaaaagaaaaaccaaggctgggcacagtagctcatccctgtagttccagctactcgggaggctgagacaggagaactgcttaaacccaggaggcagaggttgcagtgagccaagatcaggccaatgcattccagcctggcccacagagcaagactctgtctcaaaataaattaataaataaataaaaataaaaatcaaataaagaaaaacaaaatcaaaaatcaaaaaagtggtttcagctgtgccctctgaaacttaatgtttcttactgacttttctaaacctaagtgtctccatccatagtgagggatcccaaggccatggtcacaccctgatgtgtgactgtctcatgaggaaatgatgggaattcctttatgactctgcagtggtccctccatgtctgctggagggggtcctggctgattcccagctctacatcctgtagattctcacacccagggcctccttcggcctcttctcaggggagtctcagagcaggagcctctctcccttgcccagtgaaagtcattctcccctctcccatccacctcacccgcagccacaatcctgagactttcccccgggaggcacacttctcctcgctgccctgctgctctcacggaaaccctgtcctgcttctcacactgacatctgctctctaatcacagaggatcctgtcattaaaagactcctggcctgggacaaagatctgagggtgtcggacaaggtaaggttgttctctatgtaactgtgttcctgttctaacgcacggccagggggagggcgcagcttccaaacccacagttctccctccaccacctcccaccagatgctcctacagtttttttttgtttttgtttttgtttttgttttgtgagacacagtcttgctctgttgcccaggctgaagggcagtgtctcgatcttgactcactgcagctgatgcctcctgggttcaagcgattctcccacctcagcctccaagcagctgggattacaaacatgaaccaccacgcctggctaatttttgtgtttttagtagagacggggttttgccatgttggccagattggtcccgaacacctgacctcaggtgatccacccgccttggcctcccaaagtgctgagattacagacgtcagcactgtgtctgaccagctcccatggtcttgagtcttggcacccacacatttttttttctgagacaagagtccagctctgctccccaggatggagtacagtggcatgatcatagctcactctaattcctgggctcaagcaatcctctttccttagcctcctgaggagctgggactaggcacatgctaccatgctcaactaatttttgaaatcttcgtagaaacagggtctcgctgtgttgcccaggttgttctccaactgttgggctcacatgatcctcctgtctccacctctcaaaaagtactgggatcacaggcttgagctgccactcccggctattctttgtctttttatgatttgtcagcatctccgtcaggattctgctggtctcttgcagagtgaatgagtggcccctgcctcccctatgagtcctttgggatctgagccctgggccacagtctggctgcagccctgaagctcctgggccctctactctcagctccttgggacagttctctgcctggcacacaaaagaccctcctgacaccagccgacctagacacaccccctccaaagatcccatcggagcccaccatcctgggagcatcaccgaaaacccttcctccggcttctcggatttgcatccgaccttcgaatacccctccaccccgcaatttccacatgagcacagtcaccccaatgctgaggtcccttctctgatgggcagcccctccccagacccccattccactatctccacaatcttcctctcccaagatgtgacctctccctctctgtgttcctttctctccatcagtatctcctggctatggtcatagcgtatttcagccgggccggcctcccctcctggcaataccaacgcattcatttcttcctggctctgtgagtggtttgctgcctcctatccatcaatatccaatgccctgggacagcgggggaagtgggattccagcctttcatttattctttcacctatttgtcctctttactctgtgtacaaaaaagacaggattatagtatcttagactgttatttctaaaaagaaactcaggctgtgcatggtggctcaggcctgtaatcccagcactttgggaggctgaggcaagcggatcacctgaggtcaggagtttgagaccagcctggccaacatggcaaaaccccgtctctactaaaaatagaaaaatcagtcgggcatgttggtgtgcacctgtaatccaagctacttgggaggctgaggcaagagaaccccttgaacccaggaggtggaggttgcagtatgctaaggttgagccactgcactccagcctgggcaacagagtgagactttttctcaaaaaaaaaaaaaaaaaagccaaaaaaaaaaaaaaaaacaggcaaaaaaaccaaactccaatgccagtgtacaaatacaagagtaaaacaggccaggtgcggtggctcacgcctgtaatctcaacagtttgggaggccgaggtgggcggatcacaaggtcaggagagcaagaccatcctggctaacatggtgaaaccctgtctccacttaaaaaaaaataaatacaaaaattagccgggtgtggtggcgggcgcctgtagtcccagctactctgaggactgagggaggagaatggcgtgaacctgggaggcggagcttgcagtgagccgagatcgcaccactgcactccagcctgggcgacagaatgagactccgtctcaaaaaaaaaaaaaaaaaaaaaaaaaagaacaaaaaacaaaaggaaccatgaaccgctcctaaggggagaagaaaaggagcggaggagcggacatgacacttcccccagcaagcagacgtttccggttcttctctctctctccttcccacatcaaccgcaaaagccatcagcctcctccgggttcccgtgacagaggtcacagtccaggtcccccttgcatcactcgaatccactgtcaaatgctccctgctggggtttcctggagtctctccccaagccagggggcttcctagtgcagcctgaacatctttccaaagcacgacaacctcactgcccacctgaacaacttccttagctgatgtctttctctatcgaggccagggtccacagtgccaattccaccctctctacaatctctacaaccacactggctcgccatcttggtgtttcctggcttggcttcactgctccttccaaatgccctccacttgactttgcatttgtgttttctgtctgggtgtcccacacacatgtggttctgaagggaaggacccattccttgaagtcggttcaccccacagcctctgtgatgccttccctcatcttccaacttctgcatgaccgtagctctccagttacatcctgttataacgtgacattgggattaggtcatctcccctgattactcccagtcccattagactagatgcctgtagaaggcagggtcctggcaaaatatcagtgtattcaattgctttttttttttttgagacagacttgccctgtcccctaagctggagtgcagtggtgagatcatagctcaccgcagcctccatatcctgggctcaagcgatcctcccacctcagcctcttgattagctccgactacagggctgtaccaccacacctggacagttatttatttatttatttatttatttatttatttatttatcaagacaagagtgttgctgtgtctctcaggctggaatggaggggcccaatcttggctcactgcaacctccgcctcctgggttcacacaattcttatgcttcagcctcttgagtagctaggactaatgggtgtgccaccgcaccaggctgatttttgtatttttagtatagatggggtttctctgtgttgaccaggctggtctcaaactcctggtctcaagcaatccacctgcttcagccttccaaagcgctgggattacaggcatgagccaccgcgtctggtgtattttttatatttttaatagagacgagggtcttgctatgttgcccaggcctgtctcaaactcctggcctcaagtgatcctcctgcttcggcctcccagtgtgctgggattccaggcataagccaccactcttggtcaccagttgggtttttgtctccatcctgaaggagtgggagacgcccttgatcaggtctctgtccagcagagccctcctgaggaaggcatggctctctgcagggtgggtgccagtcctgagctagggacggtcccttaccttcctctctgagaagctgacctcagccggaggtctctcctggtggtgcccctgagcagcaacctgatttctgtcctcagctatctggccaatgacatggaggaggacgatgaggcccccaaacaaaacatcttctacttcctgtacgaggagacccgctctcatatacccttgctccgtgagctttggttccagttatgccgttacatgaacccgagggccaggaagaactgctctcagatagccttgttccggaagtatcggttccacttcttttgttccatgcgctgcagggcttgggtttccctggaggagttggaagaggtgggtggggcctggggacgtggaggatgtggggaggaatcgggtgggctggaggctggacgaggggagagaggggtatcctggggagtccccgtcttctcaaagcgcgtttgtttttccagatccaggcttatgacccagagcactgggtgtgggcgcgagatcgcgcccacctttcctagagctccagggaccgtggaggcctgaggtcatcggcctgagagaaggtacatctgcatcctccggggtaaaggcagaatattggggtctatttcggaaatccaaggaacccaattgcttgatctggcttcaagcctgggcaacgtggcgagatcccctctccacaaaaatacaaaaattagccaggcgatgtgggaggcatctctactcccaactactcaggaggctgaggcgggaggatcgctggagcctgggaggtcggggctgcagggagccctgatcctgccactgcactccagcccgggcgacagagtgagaccctgcctcaaaaataatcataaatactgagttcggggaggttcattatgattgatgcacttgagttaccgatctgggtcgagggttcagtgaagctttggtttacatcttgtgcagctaaccatgttgagcacagagcatgagactttgtcatgaggagggaggattatggattaggcttctggactcgtggttcgtgatgttgtcacgttagaaacagatctagcacggttacaagtttagatctgaagtgacacaaaaggccccagctgtgatgaagtccaaagccacattctctgagggtgccctactccctgggaagacccacccaaagtccttgctatgaagcagatcactggggctgaccttgggtgtattaagttttggagtcagggtcaccaaagtgtgagtttcacagttgaacacgatggttcagaagcagggtatagaatgaaaggcaggagataaaattgcacttctcaattgctctgaactctagctagacttgacatgggacgtgaataaccttcctgtctagagagctgcctccttgaagtgtgacattgtctctctcacttccagaacaccggacccaggggagatgtggattttcagcaggaactttattccaatgctaatggcagacatcaggaaggaggagaggaaccatttgtgcagatcatctagaagaacctggaccattcttgacagagctgaatacagtgatcacgttgtcctccaaggagcaggggtggggtggggtacttctaggagtccttggagaaaagtaagaaaccaggagtgtttccagttccaccctttcctgcggcaccacctccctttttatattgctgaatgccaacctccctggggcggaacctggaggtcctgtttcttatggacttggttgccacagtccaggagcatttgaaggcacagtgcaggggctcagattggcacagaattctttgtgaaatatgagtgccacagactgtaacagatagcttcatgcacactatgcattttattggtttgtttggaaaatgttggccattgaattattaataggtttatttcaaatagtttggaaattgttgtacttttgaaaacatgctgttcctgtagagttttttgatgagagttatagttgttatatatacctaaagataattttcttttcatttttaagtgagaattctttttatcctaaatcttttattatctttaaatttttttctgtattattatatgtgctcctgaagcgagcactctttttatctatgatacttccataataatctcttctatttatagctattggtagttccccaccagaaaaaaacataattctggtgatagaaatttttatttgctgtttaggtttgtgactgaattgtgagaattcagttgtgatttttaacatgtctcagatatatatactaacacgtctaatatatactatctattttattggtttattttgaaaaacatgggtatagaattatttaaatattattttatttattgaaatatttattaaatatgtttatttatttaaatattattattactttaaatattattttaaatattttggaaatactggtatttttgaatagatgctgtttctacaaagctgtgtgatgggtgttataactgttgtatacacatacatataattttgttttcctttttaagagaggattcttttcatcctaaatcttttacctttcaatctttgtatctattattacacgtgctgctgaaggggagcatggtttttatctatgatacttagttaacatatatattacatttatagctatgtggtagttcccctaaattcttgtaaaaataaatttttatttgatatttagtgtatgtttgaaatgtgagaattcagatggaattttttatcttgttttggcatgtttgtatgttactttaaagaggatgtgtgttctaaaggaggacatgagctgtgtgttttcaagagaacagtgcagtgcatctcttggggaaacataataaagatgaacttttctcaccttcacagtgagtgtgatcatattgtggtctggattgattatttgctgtcaagtgacatttttccttaatggggttgtgcttatttgaacatatttattagctttggaagataatcctgtgctgttttttatgtagaaaaaaacatacggctgggtgcagtgctcacacctacaatcccagcagttttggaggtcatggcgggaggatcacttgaagcctatttttaatttttattttttaaagaaaaacaacagaagagaaggctgatcccaagctacagggtttttttgtttgtttgtttgttttggagacagtctcgctctgtctcccaggctggagtgcagtggcacaacctcggctccctgcaactttcacctccgcgttcaagcaaattctcctgcctcagcctcccaagtagctgggactacaggcatccgcctgtacgtctgactaacttttgtaaaaatagtagagacaaggtttcaccatgttggccaggctggtctcaaactcctgacctcaagtgatccacccgcctcagtctcccaaagtgctgggattataggcatgagctactgtgcccagaccccaagctagagttttaaagcaggaaatgagagaaagatattgagagaggaaaaccaggtggtaagaaaactctaaaggtggctgggcgtggtggctcacgcctgtgatcccagcaggagttcgagaccaggcaggagaatcactagcagagaatatgtctccccaacccctctcaaaaaaaaaaaaaagtccaggcgcggtggctcaggactgtaatcccagcactttgggaggctgaggtgggcggatcatgaggtcaggagatcaagaccatcctggctaatacggtgaaaccccatctctgctaaaaatacaaaaaattagctgggcgcggtggcaggcgcctgtagtcccagctactccggaggctgaggcaggagaatggtgtgaacccaggaggcggagcctgcagtgagcagagatcgcgccactgcactccagcctgggtgaaagcgcgagactccatcacaaaaaaaaaaaaaaaaaaagaaagaaaaaaagaaagttcctgcaacagttcaagctgtgaaagacaggcactctgccatgcaattctttgtgatttttcttttttatttttggagtcggggtcttgtgctgtcacccagactggggtgcagtggtgcggtcatagctcactgtgggctcagactcaagctcaagcaatcttcttatcttgcctttctaattgctgggattataagcatgagccactgcacctggcctgtgtgacgtaattctgatgtcaactccctgatgttacatcaaatgccacaggttaaggccaccagcccccgctaggctgccctcgcttcagatgcagctgcaagcttgggtgtccacagaccgcatgtacttctcaccaactggctgcaaatttggaggttcccaccacgtcctcaggtttgataattcaccataacaacccacagaactctgaaaagcatgatactttctctttctttatttgagacagagtcttgctctgtcacccaggctggagtgcagtggccaccatgcttggctaattttagtatttgtattagagacagggtttcgccatgttggccaggctggtcttgaactcctgacctcaggtgatccgcccaccttggcctcccaaagtgctgggattacaggcatagccactgtgcctggctgacttctagagtttcaataacagagatgtggttcaagaagaaaagggagacatgttttgtagacagcaggagcttcatgaaaagaagccaatgaagggcaggatgtgtagctgtctacctacaggaaaccagccaggagcctccccacagggacttcagcacagacggctgggaaaatctgcattcacctgagctctggacctaagagaggacaaggccttgactgtttctacagactcacaagacgcaatctctgcagtccatgcccgtggtgtgatctgggaaacagggggccttctaaatgccaacagcaaggaaatcaaatgtgcaacagacagaaatatcggcattgacacgggccatggaaaggcctaaacagatgactgcagtccactgccaaggtcatcaaaggggtgactctgaaataataaatttcagacgccacggcccaaatagctgcacgaggtggggaagtcctccacatgcctctgcttccttcagtacctcttcatgaaataagctgaggtacttccctggggaatttcctttctctttctttctttcgagatggagtcttgctctgtcgcccaggctagagtgcagtggcgcgatctcggctcactgcaacctctccctcccgggttttggcaattcttctgtctcagacttctgagtagctgagattacaggtgtgtgccaccatgcccagctaatatttgtatttttactcgagacagggtttcaccatctaggccaggctggtcttgaactcctgacctcatgatccacccatcttggcctcccaaagtcctgggattacaggcacgagccaccacacccagacttcttgttttattttttgagatgaagtttcgctcttgttgcccaggctggagtgcaatggcgagatctcagctcactgccacctcctcctcccaggttcaagtgattatcctgcctcagcctcccgagtagctgggattacaggcacccaacaccaaacccagctaactttttgtatttttagtagagatggaatgtcaccatgttggccaggatggtcttgaacccctgacctctaatgatctacccgaattggtctcccaaaatgctgggattacaggcgtgagccactgtgcccagcccctcccatacctcttttggccaaggcagtacaattcagagaatcttgccagggaagactggtaaatggacatcaacatgatgcctatggctcctggtggatttagatacctcctggtgcttactgatacctttaccagttacatgggggcttttccatgccagactgaaaatgctggagatcactgatcaaccttcaactatttactagcagaacactcaggggactctgcagtcaccaatatctcctattgcacttggataaacacctcccgggaaatagagatgaatagaaaggaaatacttaaacaagcagaatggctacattccttcaaccagaagggtccattagtctgttttcacactgctataaagaactactggaaaccggggaatttatgaagaaaagaagtttaattgactcacagttttgcaggctgtacaggaagcatggctggggagccctcaaggaactgacaatcacggcagaaggcgaaggggaagcaggcacgtttctggccatggtggagcaggagagacagagagagtgaagcaggaggtgctgcatgcttctaaacaaccagatcccatgagcgctcactcactatcacgagaccagcaagggggacgtcagccgccatgagccaatcatctcccaccaggtctctccctcaacactgggaattgcaattggacatgagatttggttggggatacagagctgaaccatatcaagggtagttcaaccactgagattgattgattgactgagatggggtcctgctctgttacctaggctggagtgcagtggcacaatctcggctcactgcaacctccgcctcccaggttcaagcaattctcctgcctcagcctccctagtagctgggactacagcacacgccaccacacctggctaatttttgtattttcagtagagacggggtttcaccatgtttgcccggctggtcttgaactcctgacctcgtgatcaccctgcctcggctcttcctttgctggaattacaggcgtgagccaccgcacccggacaaccactgagacttagaaggcagtcgagtccactataccacacctcacctggtttcttcctctgctggggcccctcgtggccactgttctgttactttttggtcctatttatttaaatggatggtgagctgtttgtcctccaggatccaacacttccaccttcagcttgtattacaacaataccagcctttcaagctactccgggtgaccccagaactcatctgaactcagaagcccaagagtttcattcctctcactttaggggactaagtgcccctggtcagcatgaagtcgatacagaagcatgacctccatccctaatccctcaagaatgaggagtggaaggtgttggcaggagggtgggacgcggtttgtaaatctgtaactgcatcagaccaaatctagttcaacttttttttttttttgatggagtttcactcttgtcacccaggctggagtgcaatggcacgatctcagctcactgcaacctccacgtcctaggttcaagcattctgctgcctcagcctctggggtagctgggattacaagggtgcgccaccacgcctggctaatatttatatttttcgtagagacggggtttcaccattttggccaggctggtcttgaactcctcgacctcaggtgatccacctgccttggcctcccaaagtgctgggattacaggcctgagtcaccgcacccaaatcagttcaacttttatgtaatgaagttgtcagttgtttttcaattgccatcgacctgcaggttgaaggtcatgtaccctgtgcatgcccaggttaaccacgcatgccaccgtggagtggaacctaagagctcagcctgaagagctcggaccgatttaagaaccagacacccccaggcaggagccaggatccaatcagattgagttttggtgtcaccccatggcaggatccagtcagatcacacctcccagcattactttattgcaagatccaatcaaatcacacctcattaccctatgcttataaaacctgacatagcccccagctgtgtaagggagatttgagtacttcctcctgtgttcttgctggctgacttacaaaaaagctttaaaaaaaaaagccaggcgtggtggctcacgcctgtaatcccagcactttgggaggctgaggtgggcagatcacttgaggtcaggggtgcaagaccagcctggccaacatggtgaaaccccatctctactaaaaatacaaaaattagctgggtgtggtgacacacacctataatcccagctacttgggaggctgaggtaggagaatcacttgaacccaggaggcggaggttgcagtgagccaagatcacaccactgcactccagcctgggcgacagagtgagaagactccgtctaaaaaaaaaagttaaaattagcaccaaacgctttacaagtaaaaaaagtttttagctgcatatgtttaagtaactttttagattataagaaatacgcatgcaaaatggaaaggcacaaagaagagagcaaaaagtgcatgagatctcacatccaaggataaccgctgagaacatggaagtgctgactcttcagtctttatactatacacatttaggcctgttttgtttttataaaactgtaatcatataatacagacagttttataatctgctttttaaacacaacaattatataacatttagctgtttcatttgcattcaaattcataagggttccagtaactcatttatcagaaaaccaagagaaatattctcataaaaatataagtacataaggtcaggcatggtggctcacgcctgtaatcccagcactttgagaggccgaggtgggcggatcacctgagggcaggaattcgagaccagcctggccagcctggacaacatggtggaaccccgtctccactgaaaatacaaaaattagccgggcgtggtggcgcgcgcctgtaatggtagctactcagaaggctgaagcaggagaatcgcttgaacttggcaggtggaggttgcagtgaactgagatcgcgccactgcactgcagccagggcgccaaagtgagactccatctcaaaaaaagataaaaataaaaaataaaaaaaatgtatatatatgtatatatatttttccagacagggtcttactctgtctcacagtctgaagtgtagtgacgcaatcatagctcactgcagtctcaagttcctgagctcaggtgatcctcccacttcagcctcccaagtagctggaactacaggtgcatgccaccatgcccagtcaatttttttttttaatttttcatagagacagagtctcactatgtttcccagtcctaataaacattatgtgataaaaagaaaaaagtaaatcatcctgaagttaagtctttaatgagaaatgcaaataaagcatttctcaataaattatgggaagagaatcaactgaagaataaacatctttagtaaatcttttgctcatgtgcattaaccaatactcttgaaaaccaggattaatttactgtaccttcttaatattcctttgaaattccttatggcgcacaggtagcgtagaaaataactgcttcacgctgactgtggtccctctggggtgggggtagggggttttctggatgattttcccatcgtgatcaaacaccagtcgagtcccaaccttcgccgatacgtggcaggtagaaatggtgacatcactgtgagagaataccaggcatggtgtgttcagtgagagatccgtgatgttgggcactgactactcttttcttcacttgcttttctctcaaaattttcttaaaaagctgatgatccctctgagataaccgagatctaaacggttgaggagtcatcacaaaatctaaggtctggcatctaaaagacagtgagacagagagcactaaacatgctttgttttgataaaagctttgacttcatttttcaggttgaattgcaaaaccataaatgatctcaagatttattgattctcaaatagagatttgttttgttattactcttcaaacaaaattttttaaaagaatttttttaaagaattttttaaaattttaaaaattttttttaaagaatccaaaagatattataattaaaatgtatatgtagggcagggtgcggtggctcgtgcctgtaattccagcactttgggaggccaaggagggcagatcacttgaggcctggagttccagaccagcctgggcaacatggcaaaaccccatctctactaaaaatacaaaaattagccaggagtggtggtgcacgctatagtcccagcacttcaggaggctgagtcacgaaagtcacttgaacctgggaggcagagactgcagtgagctgagactgtgccactgcactccagcctgggtgacagagtgcgactctgtctaaaaaatatatatatatatatatatatatatatatatgtatatatatatgtgtgtgtgtgtgtgtgcatgtaattatttataaaaatttagtatctgtgctataattaaatagtgctttggtgaaatgtttccctaaaaattgataatgaaaaccaatggtaactatcatttattatctatatgttctgttcaaattgagaagttactgttttaataagggtaaccaattttttaaacaatactatttgcttcatttcattcatttattgctcacatttcagaagtactaggacttagattggcagtgagacaaaacagaattcagaagctagaagctgagatattgagatagaaaattgtaaataataatgattccaattaattttcagagaggtttttctaaggggtcaagtgaatggataaaaatattttatcacctcagtgcacaaagtgagctcagagcttccccccgaaagccaaaagtttcaacccgagttaggtcggcaaactcttgaatcttagatgtgtgatgtttcagagctgaaagagactgtaaagtaaggactaagacatctcaagtgctataacaacaaatatacatgatatctagtaactggctttagaaaactgtttttgtgtttcccaagacagtgttactcaaaattctaagacatgtggcccaattattttataataggattagaaagttaacttacttaagccttcgaagttttcttcttctaccccacatccattgcctgaaacttcaatgagatccattccatagtccttaagctttagatctagaaagtttaaaatatttatatatttattaaaaatggacccacgctatcagtttttatattgatattatttataacgtgcaaatttaagtgtcgtaactatacctttagttaaacatactagtgtcattttgtatatttcatttttataaagttctttctgaccatttactagcccagattaaatagtttagcattttctttctttcctcttttttttttttccttacactagtcaagtgaagcagttggagtggagaaggaacaaaaaaatctgtaactggttgtgatcaattagttgtaaagaccgttgcactttgaccagccttttcctttgaaagaaataattttaacatacccagtaaggagaacgggggccgggcgcagtggttcatgcctgtaatcccagcactttgggagaccaaagcgagcggatcacctgaggtcagtagttcgagaccagcctgaccaacgtagagaaactctatctctactaaaaatacaaaattagccaggcgtggtggtgcatgcctgtaatcccagctacttgtgaggctgaggcaggagaatcgcttgaacctgggaggtggaggttgcagtgagttgagatcgtgccattgcaccgcagcctcggcaacaagagcaaaactctatctcaaaaaaaaaaaaaagaaaaaaaaacagaactggttctggaatcagacttcctagattctattttattagctttataatctcaaaaaaaggaaatttactgtcccttaatttcctcaactgtaaaatggaggtaataagttctatctcataaagttatttggcagattaataattttttttttaattttgtcattttcttttttttctttccttttttttttttttttaattttttgagatggacttttgctcttgtcacccaggctggaatgcagtggcacaatcgatcttggctcactgcaacctccacctcccaggtttaagcaattctcctccctcagccttctgaggagctgagattacggccatgcaccatcacatctggctaatttttgtatttttagtagagacagggttttaccacgttggttaggctggtcttgaactcctgacctcaaagcatcagcacccctcagcctcccaaagtgctgggattacagatgtgagccactactccaggatttattttattttattttattttattttatttttttgagacggagtcttgctctgtccccaggctggcgtgcagtggcacaatctcggttcactgcaacctccacctcccaaatttaaacaattctcattcctgagcctccccagtagctgggattacaggcttctgccaccaggtctggctaatttttgtatttttagtagagacagagtttcaccattttggacaggctggtctcgaattcctgacctcaggtatccacccgccttggcctcccaaagtgctgggattacaggcgtgagccaccacacccggcctgctttattttttaatagagacgaggtctccccatgttggccaggttggtcttgaactcttggcttcaagcaatccccccacctcagcctctcaaagggctaggattacaggcgtcagacaccacgcccagctattctgcaaattaaatgagatatttctgtgcaattcttagcataacacctgcctggcacaccataagaacacaagaaaagctgtcgttattattattactacctagctaagtactaggcacataataggtgctaactttaacttaaaaataatagtttattactacatcaacacttgatagtcttatttcaataacaaatgtttcttgactacaacaacattcactgatcatttcttgtggcttaaaactctcccaaacttaccaatattagtggcaccagcatccagactgttttctaccatcttcttcaccgcagtgcttagactcagtactaccggcccagagcaaatctgatggactgacttccgatcaataggtttgatggccttagcaggttctgtactaaagaaatcagttacaagaaacaaagcaagtattcagctatatattttcatcctgattttaactgtgggaaatgactcaacactgcaaatagtttatgggtctaatctattcatttattatattaacaaatacatttattatatccagaaatggaaacattgttttacaatccttaaacaagtacccaaaatacttctggatagacacttcaaattcaacacatccttactatctagtatccacatggagaaaacatacattgtatctctcaaattaccaaaatctttggcaataatggtgtcttctttcttgaaaactgaaagcatggccggtgcggtggctcatgcctgtaatcccagcaatttgggacacagaggcaggcggatcacttgagatcaggagtttgagaccagcctggccaacgtcgtgaaaccctgtctctaccaaaaatacaaaaaattagccaggcatggtggtgggcgcctgtaatcccagctacttgggaggctgaggcagaagaatcacttaaacctgggaggcggaggttgcagtgagctgagattgcagcattgcacgctaggctgggcaatgagcaaaaaaaaaagtaaaagcaacataatttcccacataattagaaaaaccaacagtatgctgggaaatacacaatgtttaagtcaaaatcatctcagaaattggataccagttatataactattccttatacacagttgcctttgataccctactccaaattgaagctgccagctgctgtcttagcaaagaccctcaaagttcttgctgtacttgttttaagagtttttttttgtttgtttgttttttttgagacggattcttgctctgtcgccctgtcgcccaggctggagtgcagtggcacgatcttagctcactgcaagctctgcctcccgggttcacaccattctcctgcctcagcctcctgagtggctgggactacaggcgcccacgaccatgcccagctaattttttgtattttttgtagagacagggtttcaccgttttagccaggatggtctcgatctcctgacttcgtgatccgcccgcctcagcctcccaaagtgctgggattacaggcgtgagccaccacgcccagcccactttaagagttttataacggtttcatttccccttattccctgctccaacccatcctccactctatcaccagagctatttttgaaatcacgaatctggtcaaataatttttctgcttgaaaaattactagtgccccacttcctactatatgaaacttaaaatctagtcatcactgggccccaaactaccttcttttcagaatctctccgatcctttcccttcatcaagtcccctacattattattattattattattattattattattattattattatttgagacagagtctcaccctgtcacctgggctagagtgcaatggcatgatctcggctcactgcaacctccacctcccaagttcaagtgattctcctgtctcagcctcccaagttgctgggattataggcatccaccattacactcagctaatttttgtgtttttagtagagatggggtttcaccatgttggccaggctggtttctaactcctgacctcaggtgatctgcccgccttggccttccaaagcactaggattacaggtgtgagccaccgcaactggccgtcccctatattgcagcacagtgaacaactgtttcctgaacatcacaagctctcttagacactacagtgtataagcaggtctctgtctaaactgctctcctcttgcccctctgcccaaccaatgtctgctcatccaaagaatgtatcccgtgtgttcattaacttagcaagttcccagtaaacagtttaattgatcactcgttaagagaaggcgggaaacctccatgaaaagagaaatcagtgggtatttcctacagcatttaacacatcgtaggccttcaataaacccttgtgaaataaacaaacctctttactcttcattctatgttgctaagaatctcacctaagtctgtctaccatgtgaaactgcagatgacctcacagaaaatggaaagaagtatctctaaaaataagtttatttggcaacacactacaggctacaggttcacttctgattttttttctttttttttttgagatggagtcttgctgtgtcacccaggctagactgcagtggtgcaatctcagctcactgcaacctctgtctcctgggttccagcgattctcctgcctcagcctcccaagtagctaggattacaggcgcctgccaccacgcccagctaatttttgtatttttagtagaaatgggatttcaccatgttggccaggctggtcgtgaactcctgacctcatgatccacttgccttggcctcccaaagtgatgggattataggtgtgagccaccgcacctggtccacttcagatatttagatacagacggcaaatttatttaaatgtctcaatacatttaaatgtagttacctaaatatatctaatatatttaaatgcagagagcaaatttgcgtttacaaatctgacatggaattcaactgtgctagccaagattcggtgtagcttaccagccagaaatcacataccctaacaggtaaaaatgcattgcattttttaaaactgagcagctacgcaaattaggatatgtctggatgctctactgtccccaaaataacctcaatttttttttaaaaggccaggcacagtgcattacgcctgtaattccagcgctttggggggccaaggcgggcggactgcttgagctccggagttccagaccagcttgggcaacatagcgaaatccccgtctctacaaaaaaataaaataaaaattaaaaataaaataatataaaaataaaaataaaaggggagggagaacaggtagaaaggaaatgcattcagtctatggggatttcacgttccggcttcaagtccacggccctgtgatgggatgtgggcagggcctgagacaggccgaacccaactcttcacagggccgaattctttgcccgcagcccagcaccccgaaggagcttgcctcggcttcaaggcgcacctaatgggcaccggatcgctggggcgctgaggatgccgctccggggcctccacgaggtgacctcgccacgcgcctcggccatgttccccccatttccagggaggttggaagccgtggttctcaaagagggcgcgcgagaggggcgaccgcgagcccagctcacctccagctctcagctctctccaaggatgcaacaccggatccgcctcggggactgggaaagtgccctccacggctcccacaggcgccccgcctcctg

SEQ ID NO: 259 - DNA, 108 bp, Homo sapiens; identical to SEQ ID NO: 256

SEQ ID NO: 260 - DNA, 32249 bp, Homo sapiens
gacctcaaagcatcagcccccctcagcctcccaaagtgctgggattacagatgtgagccactactccaggatttattttattttattttattttatttttttgagacagagtcttgctctgtccccaggctggcgtgcagtggcaccatctcggttcactgcaacctccacctcccaaatttaaacaattctcattcctgagcctccccagtagctgggattacaggcttctgccaccaggtctggctaatttttgtatttttagtagagacagagtttcaccattttggacaggctggtctcgaattcctgacctcaggtatccacccgccttggcctcccaaagtgctgggattacaggcgtgagccaccacacccggcctgctttattttttaatagagacgaggtctccccatgttggccaggttggtcttgaactcttggcttcaagcaatccccccacctcagcctctcaaagggctaggattacaggcgtcagacaccacgcccagctattctgcaaattaaatgagatatttctgtgcaattcttagcataacacctgcctggcacaccataagaacacaagaaaagctgtcgttattattattactacctagctaagtactaggcacataataggtgctaactttaacttaaaaataatagtttattactacatcaacacttgatagtcttatttcaataacaaatgtttcttgactacaacaacattcactgatcatttcttgtggcttaaaactctcccaaacttaccaatattagtggcaccagcatccagactgtttcctactatcttcttcaccgcagtgcttagactcagtaccaccggcccagagcaaatctgatggactgacttccgatcaataggtttgatggccttagcaggttctgtactaaagaaatcagttacaagaaacaaagcaagtattcagctatatattttcatcctgattttaactgtgggaaatgactcaacactgcaaatagtttatgggtctaatctattcatttattatattaacaaatacatttattatatccagaaatggaaacattgttttacaatccttaaacaagtacccaaaatacttctggatagacacttcaaattcaacacatccttactatctagtatccacatggagaaaacatacattgtatctctcaaattaccaaaatctttggcaataatggtgtcttctttcttgaaaactgaaagcatggccggtgcggtggctcatgcctgtaatcccagcaatttgggacacagaggcaggtggatcacttgagatcaggagtttgagaccagcctggccaacgtcgtgaaaccctgtctctaccaaaaatacaaaaaattagccaggcatggtggtgggcgcctgtaatcccagctacttgggaggctgaggcagaagaatcacttaaacctgggaggcggaggttgcagtgagctgagattgcagcattgcaccctaggctgggcaatgagcaaaaaaaaaagtaaaagcaacataatttcccacataattagaaaaaccaacagtatgctgggaaatacacaatgtttaagtcaaaatcatctcagaaattggataccagttatataactattccttatacacagttgcctttgataccctactccaaattgaagctgccagctgctgtcttagcaaagaccctcaaagttcttgctgtacttgttttaagaggttttttttttttttttttttttttttttgagacggattcttgctctgtcgccctgtcgcccaggctggagtgcagtggcacgatcttagctcactgcaagctctgcctcccgggttcacaccattctcctgcctcagcctcctgagtggctgggactacaggcgcccaccaccatgcccagctaattttttgtatttttagtagagacagggttccaccgttttagccaggatggtctcgatctcctgacttcgtgatccgcccgcctcagcctcccaaagtgctgggattacaggcgtgagccaccatgcccagcccactttaagagttttataacggtttcatttccccttattccctgctccaacccatcctccactctatcaccagagctatttttgaaatcacgaatctggtcaaataatttttctgcttgaaaaattactagtgccccacttcctactatatgaaacttaaaatctagtcatcactgggccccaaactaccttcttttcagaatctctctgatcctttcccttcatcaagtcccctacattattattattattattattattattattattattattattattattattattatttgagacagagtctcaccctgtcacctgggctagagtgcaatggcatgatctcggctcactgcaacctccacctcccaagttcaagtgattctcctgtctcagcctcccaagttgctgggattataggcatccaccattacactcagctaatttttgtgtttttagtagagatggggtttcaccatgttggccaggctggtttctaactcctgacctcaggtgatctgcccgccttggccttccaaagcactaggattacaggtgtgagccaccgcaactggccgtcccctatattgcagcacagtgaacaactgtttcctgaacatcacaagctctcttagacactacagtgtataagcaggtctctgtctaaactgctctcctcttgcccctctgcccaaccaatgtctgctcatccaaagaatgtatcccgtgtgttcattaacttagcaagttcccagtaaacagtttaattgatcactcattaagagaaggcgggaaacctccatgaaaagagaaatcagtgggtatttcctacagcatttaacacatcgtaggccttcaataaacccttgtgaaataaacaaacctctttactcttcattctatgttgctaagaatctcacctaagtctgtctaccatgtgaaactgcagatgacctcacagaaaatggaaagaagtatctctaaaaataagtttatttggcaacacactacaggctacaggttcacttctgattttttttctttttttttttttgagatggagtcttgctgtgtttacccaagacatgttttagactgtaaattggaggctgaaaaacatcataacatcacttttgccctactcaatgactatcctgttactaaggttgggccaaaattaaagggggggtcataggcccccacctctttttttattttcagacagggtctccctccgctgtccaggctggagtgcaggggcgcaatcatagctcactgcagccttgacctcccaggctcaagcaatcctcctgcttcagcctcccaagtagctgggacatgggcatgcatcatcacagctggctaattaaaaacatttttttgttgagacggagtctcgctctgttgtccaggctggagtggagtggtgcgctctcggctcactgcaacctctgcctcctgggttcaagcaattctcctgcctcagcctcctgagtacctgggattacaggtgcccaacaccacacctggctaattttttgtattttagtagagacaggatttcaccatgttgcccaggctggtctcaaactcctcagctcaggcaacccgcctgccttggcctcccaaagtgctaggattacaggcatgagtgaccatgcccagcctaaaaacttttttttaagggatgggatcttgctaggctgcccaggctggtcttgaagtcctggcctcaagcaatcctcccaccttggcctcccaaagttctaggattacaggcgtgagccaccatgcctggctgatcctcacctatttttttgttgttgtttgagacagggtctatctccatctcctcggctggagtgcagtggcttgatcatggctcactccagcctcaacctcctgggctcaagcaatgctaccacttcagcctcccgagtggctgcgactacaggtgtgcaccaccacaccctgctaatttgtgtattttttgtagagatgaggtcttgctatgttgcccaggctagtttcaaactcctggcctcagtcaatcctcccaccttggcctcccaaagtgctgggattataggtgtgagccaccacctctggccagctcccacctgttgatcaaaggagcatcaaagaatttgcagcctccagaaggaggtcatttcctgcctctgagtctcagtttccacatctatgaaataaagttaatgatccttcactccagggttgtcgtgaaggctaaattaagttgtatttggaaaaatatgtggggcacagtaggtgtgtttctcacacccagagtcagagtgtttagcagagggttagtagttgcctccagggcatgaagggctcttcctgaccctaagtgtgaggaacgctttgggttaaaagattgtacttttctgcgttcagctgaaaggtggagggctcagtgaggtggctcacacctgtaattccaatgctttgggaggccgaggtgggaggatcacttgagcccaggagtttgagagcagcttaaacaacacagtaagaccttgtttctacacacacacacacacacacacacacacacacacacattagccaggcgtggtggcatgcgcctgtagttccagctacttgggaggctgaggtgggtggattgcttgaggcaaggagtttgagacaagcctggtcaacacagtgacaccccatcatcccccaaaatcatttttctttgttttaaggcagagcctcactctattgcccaggctggagtgcagtggtgtgatctcacctccttgcaacctctgcctcccgggttcaagcgattcttgtgtctcagcctcctgagtagctaggattacaggtgtgcaccaccatgcctggctaatttttgtatttttagcggagatggggttttgccgtgttggtcaggctggtcttcaactcctggcctcaagtgatccgtctgccttggcctcccaaagtgctgggattacaggtgtgagccactgtgcccagccacaataaatcatttttaaaaggttaaatttaacctcatttaagtaatacatgtaagtctcatcgaatatttgaagccagtttgtgaggtaaagtctattattatgtgcattttaattcttagcgtttaattaaagcctcataagtacaaataaaaacaggacttgctataacaggttgccacctattttctttaaagatgacgagcagcatcttatttgcgttaacacaagtcatccacataacaaatatagataagaaaagtggccaggtgtggtggctcatgcctctaatcctagtactttgggaggccgaggcagacagatcacttgaggtcaggagttcgagaccagcctgggcaatatggtgaaaccccatctctatcaaaaatacaaatattagcccggcatggtggtgggcgcctgtaatcccagctacttggaaggctgaggcaggagaattgcttgaacctggaaggcgaagtttgcagtgagccaagatcatgccactgcactccagcctgggtgacagagcgagactctgtctcgaaaaaagaaaaaagaaaagaaaagaaaagtaaggcacttagagggtaagtggcttcactcggtactaagtaggggagtgtggatttgagccaagctgtgggttcaaaccacatcaacacctgctatgcctgactgcgtctccacgctgctgggaaggttgactgaatctgccactacctccctggggtgcatgtgcttaccaaaccattgcattatgtaaaaggcggtactgtaggtttttagttttttaatttttatttttttgagatagagtctcactctgtcacccaggctggagtgtagtggcatgatcttggctgactgcaatctctgccttccgggttcaagcgattctcttgcctcagcctcctgagtagctgggactacaggcccacaccaccacgcctggctaatttttgtatttttagtagagacagggtttcaccatgttggacatcatggtctcggtctcttgggctcattatctgcctgcctcggcctcccgaagtgctgggattacaggtgtgagccacagtgcctggcctctagtgacctcattttaacttgatcacctctgtaaagactctggttccaataaggtcacctctaaggtctggagggtcatggcttcaatacatgaattaggggtggggggcacaccatgcagcccataatactagcgtatctggttatgttaaacttgctatagccacagtctcgctgacttggattatggtgccatgggaagggcccttaaagatcatcttatctggttgggctcaatggctcacgcgtgtaattccagcactttgagaggccaaggcaagaggatcgcttgtgaccaagagttcaagaccagtctgggcaacagagcaagatgctatatctactacaggcatgcacctgtagtctcagctacttgggaggctgagagaagaggattgcttgagcccaggaggcaacagagagctgattgtaccactgcaccccagccgaggcaacagagagctgattgtaccactgcaccccagccaaggcaacagagaccttgtctctaaaaaacaaaaacaggccgggtgcagtgtcttatgcctgtattcccagcactttgagaggcagaggcgggtggatcatttgaagtcaggtgttcaagaccagcctggcaaacatgacgaaaccctaaaatacaaaaattagccgggagtggtggtgggtgcctgtaatctcagctactcgggaggctgaggcaggagaatcgcttgaacctgggaggcagaggttgcagtgagccgagatggagccactgcactgcagcctgggtgacaagagcgaaactctgtctcaaaatattaggaaaaaaaaagagagagagcctcttttccatctccccgccacagagttgtcttcagtaatttcattcccttttttcctgaggattcactgggtttctgggtcccagaggggaagttctcttcaaggtacagaaaccacgactccgcagagaaccgcagagaaccgcagagatggcagcatgaccagaccacggacaggtgtgtagaagctgctgggctgaaacttgggctgaacttccgctgcaggttgacttattcccatcagcaccaaagccgctggagggggtcatccactagcaaatgaagtgggggcacggattggaggctgtttcagaaggtcccactgagccacggactcaaggcctggccacagccctcccaagcgaggcccagatcatatttcaccacgctcagaaaaccttgccagctcatttcagtccacagtgactttgctttctttaggatctctcttgcactgtccaactcagagaatttcaaatctgaatggattccaatgatggagctaaatcaggcctcacctcagttttttaattacaatcaatagggctgggtcccagcatctgtgtcttaatgttcctccatgtgatcctcatgctgaaaggctggtatttgaaaatccctttttttggggagtgaagggtttttttagagacaggcctcactctgatgcccagcctggaatgcagtggtggatcacagctcactgcagcctcgaactcctggccgcaagaaatcctcccaccttagccaaccaaagtgttgggattgcaggagtgaccactgtgtccagccaggaaagcccttctgtttcacttgaatgatatttctgccgcagacctacagccattgttgtattaaacggcatcattgcaggaaaagaaaaggtgagaggtgactgttttgcttttttctgaacatatcagaccaaacctgggctgtctggcactttttttttttttttttttgagtcggagtctcactctgtcgcccaggctggagtgtagtgtcgtgatctcggctcactggaacctccaccttcccggttcaagtgattctcctgcctcagccccacaagtagctgggattacagaagtgcactcccacgcccagctcattgtttctgtatttttacagaaaaacagacaggtttcaccatgttggccaggctgatctcaacctcctcacctctggttatctgtcggcatcagcttccaaaagtgctgggattacaagtgtgagccgccgcacctggtttgcccattttttgacaatgtatcaacatcatctaagatgggcactgcctcagtgtagtgtgtctagacaaggtggccggaacagagaggaatatgcataccaggcttaaagacgggttaaatcagagcttttcattccacaaaagagcaattttaatgaggtcagaacatggatgttctaatatttgaaagcctgttaaccaggagagagagtaaagtgatttgttgtaggaggacacacccagctctgacggtttaaagcgtcatgaatgcaaatttgaactccagaaaagcagagcttcctaacaatgggacttccacagcaatgggatttccttccgcattcagtttgtgcctttcccatgagcgagagactcctaggagagccgcagcccgttaggaagccatgtgggaactcatccacaggttctttttgttttttttgttttttttttttttttgagatgtagttttgctcttgttgcccaggctggagtgcaatggtgtgaccttggctcactgcaacctccgcctcccaagtttaagccattctgctgtccccgcctcctgagtggctgggattacaggcacccaccaccatgcctgactaattttttgtatttttagaagagatggggtttcaccatgttggccaggctgctcttaaactcctgacctcaagcgatccacctgctatggcctcccaaagcgctgggattacaggcgtgagccactgtgcctggccggaacccacaggttctttggatggtctctgaatgtcatgaaactcttttatatttaattaaaaaaatttttttgacacaaggtcttgctgtgttgcccagactggagtgcggtgtcacgatcacagctcactgcagcccctaactcctaggctcaagcaatcctcctgccacctcagtctctcaagttgttggaacacaggtgccagccacgacacctggctaattttgttttgttttgttttgttttgttttagagatgggctcttgctatgttgcctatactggtcttgaactgctggcctcaggcagtcttcctcccttggccacccaaagagatgggattacaagcatgagccactgtgcacagctgagatttttcgacttagtctttttgtacacccagtatcttatagaatatccataatatagattcataaataaaccatttccttcaatggtataaataaataaaccactgctataaatggtggaattttctgagttaagagcaatacatatgatacaaaacttgatatatagagtttcttagccaaactggaggggctggctttaggtgatccgtggactccctgaaattggggacaccattggaaatatgtgtgaactcatgggcagtttcctatgatttccagtcctcaaaatatctcttggactcaaagatgccttagggcagaggacgcgtgtacccccagtacagaatctcggacagtgaatgtcagtagacactcggcagaaaacctctgccaaattgagtgctctgatgtgactttttcatcaagtcaatgttcctgggatctcttgtacatgataatctcactcttgtaaggtttcatcgtttctgcttaccctacttttctttcccatcctgatccctctcccaccagactggactctgaaacgggcatgtacagagaagaggagaccccaacacgcttcaagctttgagtggagaggacacagcctctgctgggacagggaacagagggatgcggagaccctgaagatgcttttggacagtggtctgaggttgggacagtggcaggagataccattcacccaggatctccaggacaagagatcagcctggcagttacatgtgttttttttcaaactggttgccaggttggcatgagcgatgacatcagagattccgaccttcctgattggagggaccggactctgtcggcacctgggagttcagttggacaacagtaacttctcagagctgttctccactcctgacttctcccagcctcgagaattgataacacactcttctggatcccagcagtgtccagaagaagaccaaggacagaacagagactaggtttggtgagatgggacagattttgggaaagatcatgatgagccatcaaccgcagccccaggaagagcggagcccccagcggagcacctcagggtaccccctccaggaggtggtggatgatgaagtgtcgggaccatcaggtgaggggactggaggaagaagaggtggcataggattgactaagatgaaggaagggggccaggcgtggtggctcacccctgtaaccccaacactttgggaggctgaggcgggcagatcacctgaggtcaggagttcaagaccagcctggccaacatggtgaaaccccatctctactaaaagtacaaaaattagccaggcggtagtggtgtgtgcctataatcccagctacttgggaggctaagacaggagaatcacttgagcctgggaggaagaggttgcagtgagccgagatcgtgctactgcactccagtctgggtgacagagtgagatgctatctcaaaaaaaaaaaaaaaaaaaaaaaaaaaaaaaaaagaagaaaaaaaagaagggtcagaggtcaggaaggagaacctggggagggtgtgtgggaagaatggagaaattcaggctgggtgcagtggctcacacttgtaatcccagcactttgggaagccaaggcaggcggatcacttgaggccaggagtttgagaccagcctggccaacatggtgaaaccctgtctctattaaaagtacaaaatggagctgggcattatggcaggcacctgtaatcccagctacctgagaggctgaggcaggagaataactggaatccgggagatgcatgttgcagtgagctgagattgcaccactacactccagcctgggtgacaaagcaagattctgtctcgaaacaaaaaaaaaaaaaaaaaaagagggactcagagagccagggaccagggaaggatatgaggcagtgttctgaggacagagagagggaagaatggggaggggaaggagtggcacatggggttgagcagaggagaaagtcagaaaggtggcttggagaagccagcagtctgcgaggctggggaggatggagagtggtttggggtttggggtcggggtctaacgtgatcagttgcagaagcattacacggtggcctggtttctttactcagcccctggggtagatcccagccccccacgtaggtcccttggctggaaaaggaagagggaatgtttggatgaatctgatgatgagccagagaaggagctcgcccctgagcctgaggagacctgggtggcggagacgctgtgtggcctcaagatgaaggcgaagcgacggcgagtgtcgctcgtgctccctgagtactacgaggccttcaacaggctgcttggtaggaggacaccccagagagcacctccaatcctgttctttctaaagaggaaacttccaataaccacacttttccaatgggaaaaatatgccccagtgggtgagctctccatgcgggaggactctgaagtgatcactcatgagggacacttaaggagacaacagaggattaggtagacttgataaaggtcggtgcttgggataagaaagcttggttttgggccaggcgctgtggctcccgcctgagatcccagcacgttgggaggctgaggcaagaggattgcttgaactcaggactttgaggctgcagtgagctatgactgcaccactgcactccagcctgggtgacagagcaaaactctgcgtcaaaagaaaaaccaaggctgggcacagtagctcatccctgtagttccagctactcgggaggctgagacaggagaactgcttaaacccaggaggcagaggttgcagtgagccaagatcaggccaatgcattccagcctggcccacagagcaagactctgtctcaaaataaattaataaataaataaaaataaaaatcaaataaagaaaaacaaaatcaaaaatcaaaaaagtggtttcagctgtgccctctgaaacttaatgtttcttactgactttgctaaacctaagtgtctccatccatagtgggggatcccaaggccatggtcacaccctgatgtgtgactgtctcatgaggaaatgatgggaattcctttatgactctgcagtggtccctccgtgtctgctggagggggtcctggctgattcccagctctacatcctgtagattctcacacccagggcctccttcggcctcttctcaggggagtctcagagcaggagcctctctcccttgcccagtgaaagtcattctcccctctctcatccacctcacccgcggccacaatcctgagactttcccccgggaggcacacttctcctcgctgccctgctgctctcacggaaaccctgtcctgcttctcacactgacatctgctctctaatcacagaggatcctgtcattaaaagactcctggcctgggacaaagatctgagggtgtcggacaaggtaaggttgttctctatgtaactgtgttcctgttctaacgcacggccagggggagggcgcagcttccaaacccacagttctccgtccaccacctcccaccagatgctcctacagtttttttttgtttttgtttttgtttttttttgtgagacacagtcttgctctgctgcccaggctggagggcagtgtctcgatcttgactcactgcagctgatgcctcctgggttcaagcgattctcccacctcagcctccaagcagctgggattacaaacatgaaccaccacgcctggctaatttttgtgtttttagtagagacggggttttgccatgttggccagattggtcccgaacacctgacctcaggtgatccacccgccttggcctcccaaagtgctgagattacagacgtcagcactgtgtctgaccagctcccatggtcttgagtcttggcacccacacatttttttttctgagacagagtccagctctgctccccaggatggagtacagtggcatgatcatagctcactctaattcctgggctcaagcaatcctctttccttagcctcctgaggagctgggactaggcacatgctaccatgctcaactaatttttgaaatcttcttagaaacagggtctcgctgtgttgcccaggttgttctccaactgttgggctcacatgatcctcctgtctccacctctcaaaaagtactgggatcacaggcttgagctgccactcccggctattctttgtctttttatgatttgtcagcatctccgtcaggattctgctggtctcttgcagagtgaatgagtggcccctgcctctcctatgggtcctttgggatctgagccctgggccacagtctggctgcagccctgaagctcctgggccctctactctcagctccttgggacagttctctgcctggcacacaaaagaccctcctgacaccagccgacctagacacaccccctccaaagatcccatcggagcccaccatcctgggagcatcaccaaaaacccttcctccggcttctcggatttgcatccgaccttcgaatacccctccaccccgcaatttccacatgagcacagtcaccccaacactgaggtcccttctctgatgggcaacccctccccagacccccattccactatatccacaatcttcctctcccaagatgtgacctctccctctctgtgttcctttctctccatcagtatctcctggctatggtcatagcgtatttcagccgggccggcctcccctcctggcaataccaacgcattcatttcttcctggctctgtgagtggtttgctgcctcctatccgtcaatatccaatgccctgggacagcgggggaagtgggattccagcctttcatttattctttcacctatttgtcctctttactctgtgtacaaaaaagacaggattatagtctcaaaaaaaaaaaaaaaaaaagaacaaaaaacaaaaggaaccatgaaccgctcctaaggggagaagaaaaggagcggaggagcggacatgacacttcccccagcaagcagacgtttccggttgttctctctccttcccacatcaaccgcaaaagccatcagcctcctccgggttcccgtgacagaggtcacagtccaggtcccccttgcatcactcgaatccactgtcaaatgctccctgctggggtttcctggagtctctccccaagccagggggcttcctagtgcagcctgaacatctttccaaagcacgacaacctcactgcccacctgaacaacttccttagctgatgtctttctctatcgaggccagggtccacagtgccaattccaccctctctacaatctctacaaccacactggctcgccatcttggtgtttcctggcttggcttcactgctccttccaaatgccctccacttgactttgcatttgtgttttctgtctgggtgtcccgcacacatgtggttctgaagggaaggacccattccttgaagtcggttcaccccacagcctctgtgatgccttccctcgtcttccaacttctgcatgcccgtagctctccagttacatcctattataatgtgacattgggattaggtcatctcccctgattactcccagtcccattagactagatgcctgtagaaggcagggtcctggcaaaatatcagtgtattcaattgctttttttttttttttgagacagacttgccctgtcccctaagctggagtgcagtggtgagatcatagctcaccgcagcctccatatcctgggctcaagcgatcctcccacctcagcctcttgattagctccgactacagggctgtaccaccacacctggacagttatttatttatttatttatttatcaagacaagagtgttgctgtgtctctcaggctggaatggaggggcccaatcttggctcactgcaacctccgcctcctgggttcacacaattcttatgcttcagcctcctgagtagctaggactaatgggtgtgccaccgcaccaggctgatttttgtatttttagtatagatggggtttctctgtgttgaccaggctggtctcaaactcctggtctcaagcaatccacctgcttcagccttccaaagcgctgggattacaggcatgagccaccacgtctggcgtattttttatatttttaatagagacgagggtcttgctatgttgcccaggcctgtctcaaactcctggcctcaagtgatcctcctgcttcggcctcccagtgtgctgggattccaggcataagccaccactcttggtcaccagttgggtttttgtctccatcctgaaggagtgggagacgcccttgatcaggtctctgtccagcagagccctcctgaggaaggcgtggctctctgcagggtgggtgccagtcctgagctagggacggtcccttaccttcctctctgagaagctgacctcagccggaggtctctcctggtggtgcccctgagcagcaacctgatttctgtcctcagctatctggccaatgacatggaggaggacgacgaggcccccaaacaaaacatcttctacttcctgtacgaggagacccgctctcatatacccttgctcagtgagctttggttccagttatgccgttacatgaacccgagggccaggaagaactgctctcagatagccttgttccggaagtatcggttccacttcttttgttccatgcgctgcagggcttgggtttccctggaggagttggaagaggtgggtggggcctggggacgtggaggatgtggggaggaatcgggtgggctggaggctggacgaggggagagaggggtatcctggggagtccccgtcttctcaaagcgcgtttgtttttccagatccaggcttatgacccagagcactgggtgtgggcgcgagatcgcgcccacctttcctagagctccagggaccgtggaggcctgaggtcatcggcctgagagaaggtacatctgcatcctccggggtaaaggcagaatattggggtctatttcggaaatccaaggaacccaattgcttgatctggcttcaagcctgggcaacgtggcgagatcccctctccacaaaaatacaaaaattagccaggcgatgtgggaggcatctctactcccaactactcaggaggctgaggcgggaggatcgctggagcctgggaggtcggggctgcagggagccctgatcctgccactgcactccagcccgggcgacagagtgagaccctgcctcaaaaataatcataaatactgagttcggggaggttcattatgattgatgcacttgagttaccgatttgggtcgagggttcagtgaagctttggtttacatcttgtgcagctaaccatgttgagcacagagcatgagacttcgtcatgaggagggaggattatggattaggcttctggactcgtggttcgtgatgttgtcacgttagaaacagatctagcacggttacaagtttagatctgaagtgacacaaaaggccccagctgtgatgaagtccaaagccacattctctgagggtgccctactccctgggaagacccacccaaagtcctggctatgaagcagatcactggggctgaccttgggtgtattaagttttggagtcagggtcaccaaagtgtgagtttcacagttgaacacgatggttcagaagcagggtatagaatgaaaggcaggagataaaattgcacttctcaattgctctgaactctagctagacttgacatgggacgtgaataaccttcctgtctagagagctgcctccttgaagtgtgacattgtctctctcacttccagaacaccggacccaggggagatgtggattttcagcaggaactttattccaatgctaatggcagacatcaggaaggaggagaggaaccatttgtgcagatcatctagaagaacctggaccattcttgacagagctgaatacagtgatcacgttgtcctccaaggagcaggggtggggtggggtacttctaggagtccttggagaaaagtaagaaaccaggagtgtttccagttccaccctttcctgcggcaccacctccctttttatattgctgaatgccaacctccctggggcggaacctggaggtcctgtttcttatggacttggttgtcacagtccaggagcatttgaaggcacagtgcaggggctcagattggcacagaattctttgtgaaatatgagtgccacagactgtaacagatagcttcatgcacactatgcattttattggtttgtttggaaaatgttggccattgaattattaataggtttatttcaaatagtttggaaattgttgtacttttgaaaacatgctgttcctgtagagttttttgatgagagttatagttgttatatatacctaaagataattttcttttcatttttaagtgagaattctttttatcctaaatcttttattatctttaattttttttctgtattattatatgtgctcctgaagcgagcactctttttatctatgatacttccataataatctcttctatttatagctattggtagttccccaccagaaaaaaacataattctggtgatagaaatttttatttgctgtttaggtttgtgactgacttgtgagaattcagttgtgatttttaacatgtctcagatatatatactaacacgtctaatatatactatctattttattggtttattttgaaaaacatgggtatagaattatttaaatattattttatttactgaaatatttattaaatatatttatttatttaaatattattattactttaaatattattttaaatattttggaaatactggtatttttgaatagatgctgtttctataaagctgtgtgatgggtattataactgttgtatacacatacatataattttgttttcctttttaagagaggattcttttcatcctaaatcttttacctttcaatctttgtatctattattacacgtgctgctgaagggagcatggtttttatctatgatacttagttaacatatatattacatttatagctatgtggtagttcccctaaattcttgtaaaaataaatttttatttgatatttagtgtatgtttgaaatgtgagaattcagatggaattttttatcttgttttggcatgtttgtatgttactttaaagaggatgtgtgttctaaaggaggacatgagctgtgtgttttcaagagaacagtgcagtgcatctcttggggaaacataataaagatgaacttttctcaccttcacagtgagtgtgatcatattgtggtctggattgattatttgctgtcaagtgacatttttccttaatggggttgtggttatttgaacatatttgttagctttggaagataatcctgtgctgttttttatgtagaaaaaaacatacggctgggtgcagtgctcacacctacaatcccagcagttttggaggtcatggcgggaggatcacttgaagcctatttttaatttttattttttaaagaaaaacaacagaagagaaggctgatcccaagctacagggtttttttgtttgtttgtttgtttgtttgttttggagacagtctcgctctgtctcccaggctggagtgcagtggcacaacctcggctccctgcaactttcacctccgcgttcaagcaaattctcctgcctcagcctcccaagtagctgggactacaggcatccgcctgtacgtctgactaacttttgtaaaaatagtagagacaaggtttcaccatgttggccaggctggtctcaaactcctgacctcaagtgatccacccgcctcagtctcccaaagtgctgggattataggcatgagctactgtgcccagaccccaagctagagttttaaagcaggaaatgagagaaagatattgagagaggaaaaccaggtggtaagaaaactctaaaggtggctgggcgtggtggctcacgcctgtgatcccagcaggagttcgagaccaggcaggagaatcactagcagagaatatgtctccccaacccctctcaaaaaaaaaaaaaaaagtccaggcgcggtggctcaggactgtaatcccagcactttgggaggctgaggtgggtggatcatgaggtcaggagatcaagaccatcctggctaatacggtgaaaccccatctctgctaaaaatacaaaaaattagctgggcgcggtggcaggcgcctgtagtcccagctactccggaggctgaggcaggagaatggtgtgaacccaggaggcggagcctgcagtgagcagagatcgcgccactgcactccagcctgggtgaaagcgcgagactccatcacaaaagaaaaaaaaaaaaagaaagttcctgcaacagttcaagctgtgaaagacaggcactctgccatgcaattctttgtgatttttcttttttatttttggagtcggggtcttgtgctgtcacccagactggggtgcagtggtgcggtcatagctcactgtgggctcagactcaagctcaagcaatcttcttatcttgcctttctaattgctgggattataagcatgagccactgcacctggcctgtgtgacgtaattctgatgtcaactccctgatgttacatcaaatgccacaggttaaggccaccagcccccgctaggctgccctcgcttcagatgcagctgcaagcttgggtgtccacagaccgcatgtacttctcaccaactggctgcaaatttggaggttcccaccacgtcctcaggtttgataattcaccataacaacccacagaactctgaaaagcatgatactttctctttctttatttgagacagagtcttgctctgtcacccaggctggagtgcagtggccaccatgcttggctaattttagtatttgtattagagacagggtttcgccatgttggccaggctggtcttgaactcctgacctcaggtgatccacccaccttggcctcccaaagtgctgggattacaggcatagccactgtgcctggctgacttctagagtttcaataacagagatgtggttcaagaagaaaagggagacatgttttgtagacagcaggagcttcatgaaaagaagccaatgaagggcaggatgtgtagctgtctacctacaggaaaccagccaggagcctccccacagggacttcagcacagatggccgggaaaatctgcattcacctgagctctggacctaagagaggacaaggccttgactgtttctacagactcacaagatgcaatctctgcggtccatgcccgtggtgtgatctgggaaacagggggccttctaaatgccaacaacaaggaaatcaaatgtgcaacagacagaaatatcggcattgacacgggccatggagaggcctaaacagatgactgcagtccactgccaaggtcatcaaaggggtgactctgaaataagaaatttcagacgccacggcccaaatagctgcacgaggtggggaagtcctccacatgcctctgcttccttcagtacctcttcatgaaataagccgaggtacttccctggggaatttcctttctctttctttctttcgagacggagtcttgctctgtcgcccaggctagagtgcagtggcgcgatctcggctcactgcaacctctccctcccgggttttggcaattcttctgtctcagacttctgagtagctgagattacaggtgtgtgccaccatgcccagctaatatttgtattttcactcgagacagggtttcaccatctaggccaggctggtcttgaactcctgacctcatgatccacccatcttggcctcccaaagtcctgggattacaggcacgagccaccacacccagacttctttttttattttttgagatgaagtttcgctcttgttgcccaggctggagtgcaatggcgagatctcagctcactgccacctcctcctcctcccaggttcaagtgattatcctgcctcagcctcccgagtagctgggattacaggcacccaacaccaaaccccgctgactttttgtatttttagtagagatggaatgtcaccatgttggccaggatggtcttgaacccctgacctctaatgatctacccgaattggtctcccaaaatgctgggattacaggcgtgagccactgtgcccagcccctcccatacctcttttggccaaggcagtacaattcagagaatcttgccagggaagactggtaaatggacatcaacatgatgcctatggctcctggtggatttagatacctcctggtgcttactgatacctttaccagttacatgggggcttttccatgccagactgaaaatgctggagatcactgatcaaccttcaactatttactagcagaacactgaggggactctgcagtcaccaatatctcctattgcacttggataaacacctcccgggaaatagagatgaatagaaaggaaatacttaaacaagcagaatggctacattccttcaaccagaagggtccattagtctgttttcacactgctataaagaactactggaaactggggaatttatgaagaaaagaggtttaattgactcacagttttgcaggctgtacaggaagcatggctggggagccctcaagaaactgacaatcacggcagaaggcgaaggggaagcaggcacgtttctggccatggtggagcaggagagacagagagagtgaagcaggaggtgctgcatgcttctaaacaaccagatcccatgagcgctcactcactatcacgagaccagcaagggggacgtcagccgccatgagccaatcatctcccaccaggtccctccctcaacactgggaattgcaattggacatgagatttggttggggatacagagctgaaccatatcaagggtagttcaaccactgagattgattgattgactgagatggggtcctgctctgttacctaggctggagtgcagtggcacaatctcggctcactgcaacctccgcctcccaggttcaagcaattctcctgcctcagcctccctagtagctgggactacagcacacgccaccacacctggctaatttttgtattttcagtagagacggggtttcaccatgtttgcccggctggtcttgaactcctgacctcgtgatcaccctgcctcggctcttcttttgctggaattacaggcgtgagccaccgcacccggacaaccactgagatttagaaggcagtcgagtccactataccacacctcacctggtttcttcctctgttggggcccctcgtggccactgttctgttactttttggtcctatttatttaaatggatggtgagctgtttgtcctccaggatccaacacttccaccttcagcttgtattacaacaataccagcctttcaagctactccgggtgaccccagaactcatctgaactcagaagcccaagagtttcattcctctcactttaggggactaagtgcccctggtcagcatgaagtcgatacagaagcatgacctccatccctaatccctcaagaatgaggagtggaaggtgttggcaggagggtgggacgcggtttgtaaatctgtaactgcatcagaccaaatctagttcaactttttttttttttgatggagtttcactcttgtcacccaggctggagtgcaatggcacgatctcagctcactgcaacctccacgtcctaggttcaagcattctgctgcctcagcctctggggtagctgggattacaagggtgcgccaccacgcctggctaatatttatatttttagtagagacggggtttcaccattttggccaggctggtcttgaactcctcgacctcaggtgatccacctgccttggcctcccaaagtgctgggattacaggcgtgagtcaccgcacccgaatcagttcaacttttatgtaatgaagttgtcagttgttttccaattgccatcgacctgcaggttgaaggtcatgtaccctgtgcatgcccaggttaaccacgcgtgccaccgtggagtggaacctaagagctcagcctgaagagcccggaccgatttaagaaccagacacccccaggcaggagccaggatccaatcagattgagttttggtgtcaccccatggcaggatccagtcagatcacacctcccagcattactttattgcaagatccaatcaaatcacacctcattaccctatgcttataaaacctgacacagcccccagctgtgtaagggagatttgagtacttcctcctgtgttcttgctggctgacttacaaaaaagctttaaaaaaaaaaagccaggcgtggtggctcacgcctgtaatcccagcactttgggaggctgaggtgggcagatcacttgaggtcaggggtgcaagaccagcctggccaacatggtgaaaccccatctctactaaaaatacaaaaattagctgggtgtggtgacacacacctataatcccagctacttgggaggctgaggtaggagaatcacttgaacccaggaggcggaggttgcagtgagccaagatcacaccactgcactccagcctgggcgacagagtgagaagactccgtctaaaaaaaaaagttaaaattagcaccaaacgctttacaagtaaaaaaagtttttagctgcatatgtttaagtaactttttagattataagaaatacgcatgcaaaatggaaaggcacaaagaagagagcaaaaagtgcatgagatctcacatccaaggataaccgctgagaacatggaagtgctgactcttcagtctttatactatacacatttaggcctgttttgtttttataaaactgtaatcatataatacagacagttttataatctgctttttaaacacaacaattatataacatttagctgtttcatttgcattcaaattcataagggttccagtaactcatttatcagaaaaccaagagaaatattctcataaaaatataagtacataaggtcaggcatggtggctcacgcctgtaatcccagcactttgagaggccgaggtgggcggatcacctgagggcaggaattcaagaccagcctggccagcctggacaacatggtggaaccccgtctccactgaaaatacaaaaattagccgggcgtggtggcgcgcgcctgtaatggtagctactcagaaggctgaagcaggagaatcgcttgaacttggcaggtggaggttgcagtgaactgagatcgcgccactgcactgcagccagggtgccaaagtgagactccatctcaaaaaaagataaaaataaaaaataaaaaaaatgtatatatatgtatatatatttttccagacagggtcttactctgtctcacagtctgaagtgtagtgacgcaatcatagctcactgcagtctcaagttcctgggctcaggtgatcctcccacttcagcctcccaagtagctggaactacaggtgcatgccaccatgcccagtcaattttttttttaatttttcatagagacagagtctcactatgtttcccagtcctaataaacattatgtgataaaaagaaaaaagtaaatcatcctgaagttaagtctttaatgagaaatgcaaataaagcatttctcaataaattatgggaagagaatcaactgaagaataaacatctttagtaaatcttttgctcatgtgcattaaccaatactcttgaaaaccaggattaatttactgtaccttcttaatattcctttgaaattccttatggcgcacaggtagcgtagaaaataactgcttcacgctgactgtggtccctctggggtgggggtagggggttttctggatgattttcccatcgtgatcaaaaacaccagttgagtcccaaccttcgccgatacgtggcaggtagaaatggtgacatcactgtgagagaataccaggcatggtgtgttcagtgagagatccatgatgttgggcactgactactcttttcttcacttgcttttctctcaaaattttcttaaaaagctgatgatccctctgagataaccgagatctaaacggttgaggagtcatcacaaaatctaaggtctggcatctaaaagacagtgagacagagagcactaaacatgctttgttttgataaaagctttgacttcatttttcaggttgaattgcaaaaccataaatgatctcaagatttattgattctcaaatagagatttgttttgttattactcttcaaacaaaattttttaaaagaatttttttaaagaattttttaaaatttttaaaattttttttaaagaatccaaaagatattataattaaaatgtatatgtagggcagggtacggtggctcgtgcctgtaattccagcactttgggaggccaaggagggcagatcacttgaggcctggagttccagaccagcctgggcaacatggcaaaaccccatctctactaaaaatataaaaattagccaggagtggtggtgcacgctatagtcccagctcttcaggaggctgagtcacgaaagtcacttgaacctgggaggcagagactgcagtgagctgagactgtgccactgcactccagcctgggtgacagagtgcgactctgtctaaaaaaaaaaaaaaaaaaaatatatatatatatatatgtatatatatgtatatatatatgtatatatatgtatatatgtatatatgtatatatgtatatatatgtatatatttatgtatatatgtatatatatgtatatatatatgtatatatgtatatatatgtatatatatgtatatatatgtgtgtgtgcatgtaattatttataaaaatttagtatctgtgctgtaattaaatagtgctttggtgaaatgtttccctaaaaattgataatgaaaaccaatggtaactatcatttattatctatatgttatgttcaaattgagaagttactgttttaataagggtaaccaattttttaaacaatactatttgcttcatttcattcatttattgctcacatttcagaagtactaggacttagattggcagtgagacaaaacagaattcagaagctagaagctgagatattgagatagaaaattgtaaataataatgattccaattaattttcagagaggtttttctaaggggtcaagtgaatggataaaaatattttctcacctcagtgcacaaagtgagctcagagctttcccccgaaagccaaaagtttcaacccgagttaggtcggcaaactcttgaatcttagatgtgtgatgtttcagagctgaaagagactgtaaagtaaggactaagatatctcaagtgctataacaacaaatatacatgatatctagtaactggctttaaaaaactgtttttgtgtttcccaagacagtgttactcaaaattctaagacatgtggcccaattattttgtaataggattagaaagttaacttacttaagccttcgaagttttcttcttctaccccacatccattgcctgaaacttcaatgagatccattccatagtccttaagctttagatctagaaagtttaaaatatttatatatttattaaaaatggacccacgctatcagcttttatattgatattatttataacgtgcaaatttaagtgtcgtaactatacctttagttaaacatactagtgtcattttgtatatttcatttttataaagttctttctggccatttactagcccagattaaatagtttagcattttctttctttcctcttttttttttccttacactagtcaagtgaagcagttggagtggagaaggaacaaaaaaatctgtaactggttgtgatcaattagttgtaaagaccgttgcactttgaccagccttttcctttgaaagaaataattttaacatacccagtaaggagaacgggggccgggcgcagtggttcatgcctgtaatcccagcactttgggagaccaaagcgagcggatcacctgaggtcagtagttcgagaccagcctgaccaacgtagagaaactctatctctactaaaaatacaaaattagccaggcgtggtggtgcatgcctgtaatcccagctacttgtgaggctgaggcaggagaatcgcttgaacctgggaggtggaggttgcagtgagttgagatcgtgccattgcaccgcagcctcggcaacaagagcaaaactctatctcaaaaaaaaaaaaaagaaaaaaaaacagaactggttctggaatcagacttcctagattctattttattagctttataatctcaaaaaaaggaaatttactgtcccttaatttcctcaactgtaaaatggaggtaataagttctatctcataaagttatttggcagattaataatttttttttaattttgtcattttcttttttttctttcctttttttttttttttttttaattttttgagatggacttttgctcttgtcacccaggctggaatgcagtggcacaatcgatcttggctcactgcaacctccacctcccaggtttaagcaattctcctccctcagccttctgaggagctgagattacagccatgcaccatcacatctggctaatttttgtatttttagtagagacagggttttaccacgttggttaggctggtcttgaactcctgacctcaaagcatcagcccccctcagcctcccaaagtgctgggattacagatgtgagccactactccaggatttattttattttattttattttatttttttgagacagagtcttgctctgtccccaggctggcgtgcagtggcaccatctcggttcactgcaacctccacctcccaaatttaaacaattctcattcctgagcctccccagtagctgggattacaggcttctgccaccaggtctggctaatttttgtatttttagtagagacagagtttcaccattttggacaggctggtctcgaattcctgacctcaggtatccacccgccttggcctcccaaagtgctgggattacaggcgtgagccaccacacccggcctgctttattttttaatagagacgaggtctccccatgttggccaggttggtcttgaactcttggcttcaagcaatccccccacctcagcctctcaaagggctaggattacaggcgtcagacaccacgcccagctattctgcaaattaaatgagatatttctgtgcaattcttagcataacacctgcctggcacaccataagaacacaagaaaagctgtcgttattattattactacctagctaagtactaggcacataataggtgctaactttaacttaaaaataatagtttattactacatcaacacttgatagtcttatttcaataacaaatgtttcttgactacaacaacattcactgatcatttcttgtggcttaaaactctcccaaacttaccaatattagtggcaccagcatccagactgtttcctactatcttcttcaccgcagtgcttagactcagtaccaccggcccagagcaaatctgatggactgacttccgatcaataggtttgatggccttagcaggttctgtactaaagaaatcagttacaagaaacaaagcaagtattcagctatatattttcatcctgattttaactgtgggaaatgactcaacactgcaaatagtttatgggtctaatctattcatttattatattaacaaatacatttattatatccagaaatggaaacattgttttacaatccttaaacaagtacccaaaatacttctggatagacacttcaaattcaacacatccttactatctagtatccacatggagaaaacatacattgtatctctcaaattaccaaaatctttggcaataatggtgtcttctttcttgaaaactgaaagcatggccggtgcggtggctcatgcctgtaatcccagcaatttgggacacagaggcaggtggatcacttgagatcaggagtttgagaccagcctggccaacgtcgtgaaaccctgtctctaccaaaaatacaaaaaattagccaggcatggtggtgggcgcctgtaatcccagctacttgggaggctgaggcagaagaatcacttaaacctgggaggcggaggttgcagtgagctgagattgcagcattgcaccctaggctgggcaatgagcaaaaaaaaaagtaaaagcaacataatttcccacataattagaaaaaccaacagtatgctgggaaatacacaatgtttaagtcaaaatcatctcagaaattggataccagttatataactattccttatacacagttgcctttgataccctactccaaattgaagctgccagctgctgtcttagcaaagaccctcaaagttcttgctgtacttgttttaagaggttttttttttttttttttttttttgagacggattcttgctctgtcgccctgtcgcccaggctggagtgcagtggcacgatcttagctcactgcaagctctgcctcccgggttcacaccattctcctgcctcagcctcctgagtggctgggactacaggcgcccaccaccatgcccagctaattttttgtatttttagtagagacagggttccaccgttttagccaggatggtctcgatctcttgacttcgtgatccgcccgcctcagcctcccaaagtgctgggattacaggcgtgagccaccatgcccagcccactttaagagttttataacagtttcatttccccttattccctgctccaacccatcctccactctatcaccagagctatttttgaaatcacgaatctggtcaaataatttttctgcttgaaaaattactagtgccccacttcctactatatgaaacttaaaatctagtcatcactgggccccaaactaccttcttttcagaatctctctgatcctttcccttcatcaagtcccctacattattattattattattattattattattattattattattattatttgagacagagtctcaccctgtcacctgggctagagtgcaatggcatgatctcggctcactgcaacctccacctcccaagttcaagtgattctcctgtctcagcctcccaagttgctgggattataggcatccaccattacactcagctaatttttgtgtttttagtagagatggggtttcaccatgttggccaggctggtttctaactcctgacctcaggtgatctgcccgccttggccttccaaagcactaggattacaggtgtgagccaccgcaactggccgtcccctatattgcagcacagtgaacaactgtttcctgaacatcacaagctctcttagacactacagtgtataagcaggtctctgtctaaactgctctcctcttgcccctctgcccaatgtctgctcatccaaagaatgtatcccgtgtgttcattaacttagcaagttcccagtaaacagtttaattgatcactcgttaagagaaggcgggaaacctacatgaaaagagaaattagtgggtatttcctacagcatttaacacatcgtaggccttcaataaacccttgtgaaataaacaaacctctttactgttcattctatgttgctaagaatctcacctaagtctgtctaccatgtgaaactgcagatgacctcacagaaaatggaaagaagtatctctaaaaataagtttatttggcaacacactacaggctacaggttcacttctgattttttttctttttttttttgagatggagtcttgctgtgtcacccaggctagactgcagtggtgcaatctcagctcactgcaacctctgtctcctgggttccagcgattctcctgcctcagcctcccaagtagctaggattacaggcgcctgccaccacgcccagctaatttttgtatttttagtagaaatgggatttcaccatgttggccaggctggtcgtgaactcctgacctcatgatccacttgccttggcctcccaaagtgatgggattataggtgtgagccaccgcacctggtccacttcagatatttagatacagacggcaagtgtatttaaatgtctcaatacatttaaatgtagttacctaaatatatctaatatatttaaatgcagagagcaaatttgcgtttacaaatctgacatggaattcaactgtgctagccaagattcggtgtagcttaccagccagaaatcacataccctaagaggtaaaaatgcattgcattttttaaaactgagcagctacgcaaattaggatgtgtctggacgctctactgtccccaaaataacctcaatttttttttaaaaggccaggcacagtgcattacgcctgtaattccagagctttggggggccaaggcgggcggactgcttgagctccggagttccagaccagcttgggcaacatagcgaaatccccgtctctacaaaaaaataaaataaaaattaaaaataaaataatataaaaataaaaataaaaggggagagagaacaggtagaaaggaaatgcattcagtctatggggatttcacgttccggcttcaagtccacggccctgtgatgggatgtgggcagggcctgagacaggccgaacccaactcttcacagggccgaattctttgcccgcagcccagcaccccgaaggagcttgcctcggcttcaaggcgcacctaatgggcaccggatcgctggggcgctgaggatgccgctccggggcctccacgaggcggcctcccacgcgcctcggccatgttccccccatttccagggaggtcggaagccgtggttctcaaagagggcgagcgagaggggcgaccgcgagcccagctcacctcgagctctcagctctctccaaggatgcaacaccggatccgcctcggggactgggaaagtgccctcaacggctcccacaggcgcccc

SEQ ID NO: 261 - DNA, 207 bp, Homo sapiens; identical to SEQ ID NO: 257

SEQ ID NO: 262 - DNA, 207 bp, Homo sapiens; identical to SEQ ID NO: 257

SEQ ID NO: 263 - DNA, 24218 bp, Homo sapiens
aactcatccacaggttctttttgttttttttttgttttttttttttgagatgtagttttgctcttgttgcccaggctggagtgcaatggtgcgaccttggctcactgcaacctccgcctcccaagtttaagccattctgctgtccccgcctcctgagtggctgggattacaggcacccaccaccatgcctgactaattttttgtatttttagaagagatggggtttcaccatgttggccaggctgctcttaaactcctgacctcaagcgatccacctgctatggcctcccaaagcgctgggattacaggcgtgagccactgtgcctggccagaacccacaggttctttggatggtctctgaatgtcatgaaactcttttatatttaattaaaaaaatttttttgacacaaggtcttgctgtgttgcccagactggagtgcggtgtcacgatcacagctcactgcagcccctaactcctaggctcaagcaatcctcctgccacctcagtctctcaagttgttggaacacaggtgccagccacgacacctggctaattttgttttgttttgttttgttttgttttagagatgggctcttgctatgttgcctatactggtcttgaactgctggcctcaggcagtcttcctcccttggccacccaaagagatgggattacaagcatgagccactgtgcacagctgagatttttcgacttagtctttttgtacacccagtatcttatagaatatccgtaatatagattcataaataaaccatttccttcaatggtataaataaataaaccactgctataaatggtggaattttctgagttaagagcaatacatatgatacaaaacttgatatatagagtttcttagccaaactggaggggctggctttaggtgatccgtggactccctgaaattggggacaccattggaaatatgtgtgaactcatgggcagtttcctatgatttccagtcctcaaagtatctcttggactcaaagatgccttagggcagaggacgcgtgtacccccagtacagaatctcggacagtgaatgtcagtagacattcggcagaaaacctctgccaaattgagtgctctgatgtgactttttcatcaagtcaatgttcctgggatctcttgtacatgataatctcactcttgtaaggtttcatcgtttctgcttaccctacttttctttcccatcctgatccctctcccaccagactggactctgaaacgggcatgtacagagaagaggagaccccaacacgcttcaagctttgagtggagaggacacagcctctgctgggacagggaacagagggatgcggagaccctgaagatgcttttggacagtggtctgaggttgggacagtggcaggagataccattcacccaggatctccaggacaagagatcagcctggcagttacatgtgttttttttcaaactggttgccaggttggcatgagcgatgacatcagagattccgaccttcctgattggagggaccggactctgtcggcacctgggagttcagttggacaacagtaacttctcagagctgttctccactcctgacttctcccagcctcgagaattgataacacactcttctggatcccagcagtgtccagaagaagaccaaggacagaacagagactaggtttggtgagatgggacagattttgggaaagatcatgatgagccatcaaccgcagccccaggaagagcagagcccccagcggagcacctcagggtaccccctccaggaggtggtggatgatgaagtgtcgggaccatcaggtgaggggactggaggaagaagaggtggcataggattgactaagatgaaggaagggggccaggcgtggtggctcacccctgtaaccccaacactttgggaggctgaggcgggcagatcacctgaggtcaggagttcaagaccagcctggccaacatggtgaaaccccatctctactaaaagtacaaaaattagccaggcggtagtggtgtgtgcctataatcccagctacttgggaggctaagacaggagaatcacttgagcctgggaggaagaggttgcagtgagccgagatcgtgctactgcactccagtctgggtgacagcgtgagatgctatctcaaaaaaaaaaaaaaaaaaaaaaaaaaaaaaaaaaaaaaaagaagaaaaaaaagaagggtcagaggtcaggaaggagaacctggggagggtgtgtgggaagaatggagaaattcaggctgggtgcagtggctcacacttgtaatcccagcactttgggaagccaaggcaggcggatcacttgaggccaggagtttgagaccagcctggccaacatggtgaaaccctgtctctattaaaagtacaaaatggagctgggcattatggcaggcacctgtaatcccagctacctgagaggctgaggcaggagaataactggaatccgggagatgcatgttgcagtgagctgagattgcaccactacactccagcctgggtgacaaagcaagattctgtctcgaaacaaaaaaaaaaaaaaagagggactcagagagccagggaccagggaaggatatgaggcagtgttctgaggacagagagagggaagaatggggaggggaaggagtggcacatggggttgagcagaggagaaagtcagaaaggtggcttggagaagccagcagtctgcgaggctggggaggatggagagtggtttggggtttggggtcggggtctaacgtgatcagttgcagaagcattacacggtggcctggtttctttactcagcccctggggtagatcccagccccccacgtaggtcccttggctggaaaaggaagagggaatgtttggatgaatctgatgatgagccagagaaggagctcgcccctgagcctgaggagacctgggtggcggagacgctgtgtggcctcaagatgaaggcgaagcgacggcgagtgtcgctcgtgctccctgagtactacgaggccttcaacaggctgcttggtaggaggacaccccagagagcacctccaatcctgttctttctaaagaggaaacttccaataaccacacttttccaatgggaaaaatatgccccagtgggtgagctctccatgcgggaggactctgaagtgatcactcatgagggacacttaaggagacaacagaggattaggtagacttgataaaggtcggtgcttgggataagaaagcttggttttgggccaggcgctgtggctcccgcctgagatcccagcacgttgggaggctgaggcaagaggattgcttgaactcaggactttgaggctgcagtgagctatgactgcaccactgcactccagcctgggtgacagagcaaaactctgcgtcaaaagaaaaaccaaggctgggcacagtagctcatccctgtagttccagctactcgggaggctgagacaggagaactgcttaaacccaggaggcagaggttgcagtgagccaagatcaggccaatgcattccagcctggcccacagagcaagactctgtctcaaaataaattaataaataaataaaaataaaaatcaaataaagaaaaacaaaatcaaaaatcaaaaaagtggtttcagctgtgccctctgaaacttaatgtttcttactgacttttctaaacctaagtgtctccatccatagtgagggatcccaaggccatggtcacaccctgatgtgtgactgtctcatgaggaaatgatgggaattcctttatgactctgcagtggtccctccgtgtctgctggagggggtcctggctgattcccagctctacatcctgtagattctcacacccagggcctccttcggcctcttctcaggggagtctcagagcaggagcctctctcccttgcccagtgaaagtcattctcccctctcccatccacctcacccgcagccacaatcctgagactttcccccgggaggcacacttctcctcactgccctgctgctctcacggaaaccctgtcctgcttctcacactgacatctgctctctaatcacagaggatcctgtcattaaaagactcctggcctgggacaaagatctgagggtgtcggacaaggtaaggttgttctctatgtaactgtgttcctgttctaacgcacggccagggggagggcgcagcttccaaacccacagttctccctccaccacctcccaccagatgctcctacagtttttttttgtttttgtttttgtttttgttttgtgagacacagtcttgctctgttgcccaggctgaagggcagtgtctcgatcttgactcactgcagctgatgcctcctgggttcaagcgattctcccacctcagcctccaagcagctgggattacaaacatgaaccaccacgcctggctaatttttgtgtttttagtagagacggggttttgccatgttggccagattggtcccgaacacctgacctcaggtgatccacccgccttggcctcccaaagtgctgagattacagacgtcagcactgtgtctgaccagctcccatggtcttgagtcttggcacccacacatttttttttctgagacaagagtccagctctgctccccaggatggagtacagtggcatgatcatagctcactctaattcctgggctcaagcaatcctctttccttagcctcctgaggagctgggactaggcacatgctaccatgctcaactaatttttgaaaccttcgtagaaacagggtctcgctgtgttgcccaggttgttctccaactgttgggctcacatgatcctcctgtctccacctctcaaaaagtactgggatcacaggcttgagctgccactcccggctattctttgtctttttatgatttgtcagcatctccgtcaggattctgctggtctcttgcagagtgaatgagtggcccctgcctcccctatgagtcctttgggatctgagccctgggccacagtctggctgcagccctgaagctcctgggccctctactctcagctccttgggacagttctctgcctggcacacaaaagaccctcctgacaccagccgacctagacacaccccctccaaagatcccatcggagcccaccatcctgggagcatcaccgaaaacccttcctccggcttctcggatttgcatccgaccttcgaatacccctccaccccgcaatttccacatgagcacagtcaccccaatgctgaggtcccttctctgatgggcagcccctccccagacccccattccactatctccacaatcttcctctcccaagatgtgacctctccctctctgtgttcctttctctccatcagtatctcctggctatggtcatagcgtatttcagccgggccggcctcccctcctggcaataccaacgcattcatttcttcctggctctgtgagtggtttgctgcctcctatccatcaatatccaatgccctgggacagcgggggaagtgggattccagcctttcatttattctttcacctatttgtcctctttactctgtgtacaaaaaagacaggattatagtatcttagactgttatttctaaaaagaaactcaggctgtgcatggtggctcaggcctgtaatcccagcactttgggaggctgaggcaagcggatcacctgaggtcaggagtttgagaccagcctggccaacatggcaaaaccccgtctctactaaaaatagaaaaatcagtcgggcatgttggtgtgcacctgtaatccaagctacttgggaggctgaggcaagagaaccccttgaacccaggaggtggaggttgcagtatgctaaggttgagccactgcactccagcctgggcaacagagtgagactttttctcaaaaaaaaaaaaaaaaaagccaaaaaaaaaaaaaaaaaccaggcaaaaaaaccaaactccaatgccagtgtacaaatacaagagtaaaacaggccaggtgcggtggctcacgcctgtaatctcaacagtttgggaggccgaggtgggcggatcacaaggtcaggagagcaagaccatcctggctaacatggtgaaaccctgtctccacttaaaaaaaaaaaaatacaaaaattagccgggtgtggtggcgggcgcctgtagtcccagctactctgaggactgagggaggagaatggcgtgaacctgggaggcggagcttgcagtgagccgagatcgcaccactgcactccagcctgggcgacagaatgagactccgtctcaaaaaaaaaaaaaaaaaaaaaaaaaaaaaagaacaaaaaacaaaaggaaccatgaaccgctcctaaggggagaagaaaaggagcggaggagcggacatgacacttcccccagcaagcagacgtttccggttcttctctctctctccttcccacatcaaccgcaaaagccatcagcctcctccgggttcccatgacagaggccacagttcaggtcccccttgcatcactcgaatccactgtcaaatgctccctgctggggtttcctggagtctctccccaagccagggggcttcctagtgcagcctgaacatctttccaaagcacgacaacctcactgcccacctgaacaacttccttagctgatgtctttctctatcgaggccagggtccacagtgccaattccaccctctctacaatctctacaaccacactggctcgccatcttggtgtttcctggcttggcttcactgctccttccaaatgccctccacttgactttgcatttgtgttttctgtctgggtgtcccgcacacatgtggttctgaagggaaggacccattccttgaagtcggttcaccccacagcctctgtgatgccttccctcatcttccaacttctgcatgcccgtagctctccagttacatcctattataacgtgacattgggattaggtcatctcccctgattactcccagtcccattagactagatgcctgtagaaggcagggtcctggcaaaatatcagtgtattcaattgctttttttttttttgagacagacttgccctgtcccctaagctggagtgcagtggtgagatcatagctcaccgcagcctccatatcctgggctcaagcgatcctcccacctcagcctcttgattagctccgactacagggctgtaccaccacacctggacagttatttatttatttatttatttatttatttatttatttatcaagacaagagtgttgctgtgtctctcaggctggaatggaggggcccaatcttggctcactgcaacctccgcctcctgggttcacacaattcttatgcttcagcctcttgagtagctaggactaatgggtgtgccaccgcaccaggctgatttttgtatttttagtatagatggggtttctctgtgttgaccaggctggtctcaaactcctggtctcaagcaatccacctgcttcagccttccaaagcgctgggattacaggcatgagccaccgcgtctggtgtattttttatatttttaatagagacgagggtcttgctatgttgcccaggcctgtctcaaactcctggcctcaagtgatcctcctgcttcggcctcccagtgtgctgggattccaggcataagccaccactcttggtcaccagttgggtttttgtctccatcctgaaggagtgggagacgcccttgatcaggtctctgtccagcagagccctcctgaggaaggcatggctctctgcagggtgggtgccagtcctgagctagggacggtcccttaccttcctctctgagaagctgacctcagccggaggtctctcctggtggtgcccctgagcagcaacctgatttctgtcctcagctatctggccaatgacatggaggaggacgatgaggcccccaaacaaaacatcttctacttcctgtacgaggagacccgctctcatatacccttgctccgtgagctttggttccagttatgccgttacatgaacccgagggccaggaagaactgctctcagatagccttgttccggaagtatcggttccacttcttttgttccatgcgctgcagggcttgggtttccctggaggagttggaagaggtgggtggggcctggggacgtggaggatgtggggaggaatcgggtgggctggaggctggacgaggggagagaggggtatcctggggagtccccgtcttctcaaagcgcgtttgtttttccagatccaggcttatgacccagagcactgggtgtgggcgcgagatcgcgcccacctttcctagagctccagggaccgtggaggcctgaggtcatcggcctgagagaaggtacatctgcatcctccggggtaaaggcagaatattggggtctatttcggaaatccaaggaacccaattgcttgatctggcttcaagcctgggcaacgtggcgagatcccctctccacaaaaatacaaaaattagccaggcgatgtgggaggcatctctactcccaactactcaggaggctgaggcgggaggatcgctggagcctgggaggtcggggctgcagggagccctgatcctgccactgcactccagcccaggcgacagagtgagaccctgcctcaaaaataatcataactactgagttcggggaggttcattatgattgatgcacttgagttaccgatctgggtcgagggttcagtgaagctttggtttacatcttgtgcagctaaccatgttgagcacagagcatgagactttgtcatgaggagggaggattatggattaggcttctggactcgtggttcgtgatgttgtcacattagaaacagatctagcacggttacaagtttagatctgaagtgacacaaaaggccccagctgtgatgaagtccaaagccacattctctgagggtgccctactccctgggaagacccacccaaagtccttgctatgaagcagatcactggggctgaccttgggtgtattaagttttggagtcagggtcaccaaagtgtgagtttcacagttgaacacgatggttcagaagcagggtatagaatgaaaggcaggagataaaattgcacttctcaattgctctgaactctagctagacttgacatgggacgtgaataaccttcctgtctagagagctgcctccttgaagtgtgacattgtctctctcacttccagaacaccggacccaggggagatgtggattttcagcaggaactttattccaatgctaatggcagacatcaggaaggaggagaggaaccatttgtgcagatcatctagaagaacctggaccattcttgacagagctgaatacagtgatcacgttgtcctccaaggagcaggggtggggtggggtacttctaggagtccttggagaaaagtaagaaaccaggagtgtttccagttccaccctttcctgcggcaccacctccctttttatattgctgaatgccaacctccctggggcggaacctggaggtcctatttcttatggacttggttgccacagtccaggagcatttgaaggcacagtgcaggggctcagattggcacagaattctttgtgaaatatgagtgccacagactgtaacagatagcttcatgcacactatgcattttattggtttgtttggaaaatgttggccattgaattattaataggtttatttcaaatagtttggaaattgttgtacttttgaaaacatgctgttcctgtagagttttttgatgagagttatagttgttatatatacctaaagataattttcttttcatttttaagtgagaattctttttatcctaaatcttttattatctttaaatttttttctgtattattatatgtgctcctgaagcgagcactctttttatctatgatacttccataataatctcttctatttatagctattggtagttccccaccagaaaaaaacataattctggtgatagaaatttttatttgctgtttaggtttgtgactgaattgtgagaattcagttgtgatttttaacatgtctcagatatatatactaacacgtctaatatatactatctattttattggtttattttgaaaaacatgggtatagaattatttaaatattattttatttattgaaatatttattaaatatgtttatttatttaaatattattattactttaaatattattttaaatattttggaaatactggtatttttgaatagatgctgtttctacaaagctgtgtgatgggtgttataactgttgtatacacatacatataattttgttttcctttttaagagaggattcttttcatcctaaatcttttacctttcaatctttgtatctattattacacgtgctgctgaaggggagcatggtttttatctatgatacttagttaacatatatattacatttatagctatgtggtagttcccctaaattcttgtaaaaataaatttttatttgatatttagtgtatgtttgaaatgtgagaattcagatggaattttttatcttgttttggcatgtttgtatgttactttaaagaggatgtgtgttctaaaggaggacatgagctgtgtgttttcaagagaacagtgcagtgcatctcttggggaaacataataaagatgaacttttctcaccttcacagtgagtgtgatcatattgtggtctggattgattatttgctgtcaagtgacatttttccttaatggggttgtgcttatttgaacatatttattagctttggaagataatcctgtgctgttttttatgtagaaaaaaacatacggctgggtgcagtgctcacacctacaatcccagcagttttggaggtcatggcgggaggatcacttgaagcctatttttaatttttattttttaaagaaaaacaacagaagagaaggctgatcccaagctacagggtttttttgtttgtttgtttgttttggagacagtctcgctctgtctcccaggctggagtgcagtggcacaacctcggctccctgcaactttcacctccgcgttcaagcaaattctcctgcctcagcctcccaagtagctgggactacaggcatccgcctgtacgtctgactaacttttgtaaaaatagtagagacaaggtttcaccatgttggccaggctggtctcaaactcctgacctcaagtgatccacccgcctcagtctcccaaagtgctgggattataggcatgagctactgtgcccagaccccaagctagagttttaaagcaggaaatgagagaaagatattgagagaggaaaaccaggtggtaagaaaactctaaaggtggctgggcgtggtggctcacgcctgtgatcccagcaggagttcgagaccaggcaggagaatcactagcagagaatatgtctccccaacccctctcaaaaaaaaaaaaaaaaaaaaaaagtccaggcgcggtggctcaggactgtaatcccagcactttgggaggctgaggtgggcggatcatgaggtcaggagatcaagaccatcctggctaatacggtgaaaccccatctctgctaaaaatacaaaaaattagctgggcgcggtggcaggcgcctgtagtcccagctactccggaggctgaggcaggagaatggtgtgaacccaggaggcggagcctgcagtgagcagagatcgcgccactgcactccagcctgggtgaaagcgcgagactccatcacaaaaaaaaaaaaaaaaaaagaaagaaaaaaagaaagttcctgcaacagttcaagctgtgaaagacaggcactctgccatgcaattctttgtgatttttcttttttatttttggagtcggggtcttgtgctgtcacccagactggggtgcagtggtgcggtcatagctcactgtgggctcagactcaagctcaagcaatcttcttatcttgcctttctaattgctgggattataagcatgagccactgcacctggcctgtgtgacgtaattctgatgtcaactccctgatgttacatcaaatgccacaggttaaggccaccagcccccgctaggctgccctcgcttcagatgcagctgcaagcttgggtgtccacagaccgcatgtacttctcaccaactggctgcaaatttggaggttcccaccacgtcctcaggtttgataattcaccataacaacccacagaactctgaaaagcatgatactttctctttctttatttgagacagagtcttgctctgtcacccaggctggagtgcagtggccaccatgcttggctaattttagtatttgtattagagacagggtttcgccatgtgggccaggctggtcttgaactcctgacctcaggtgatccacccaccttggcctcccaaagtgctgggattacaggcatagccactgtgcctggctgacttctagagtttcaataacagagatgtggttcaagaagaaaagggagacatgttttgtagacagcaggagcttcatgaaaagaagccaatgaagggcaggatgtgtagctgtctacctacaggaaaccagccaggagcctccccacagggacttcagcacagatggccgggaaaatctgcattcacctgagctctggacctaagagaggacaaggccttgactgtttctacagactcacaagatgcaatctctgcggtccatgcccgtggtgtgatctgggaaacagggggccttctaaatgccaacaacaaggaaatcaaatgtgcaacagacagaaatatcggcattgacacgggccatggagaggcctaaacagatgactgcagtccactgccaaggtcatcaaaggggtgactctgaaataagaaatttcagacgccacggcccaaatagctgcacgaggtggggaagtcctccacatgcctctgcttccttcagtacctcttcatgaaataagccgaggtacttccctggggaatttcctttctctttctttctttcgagacggagtcttgctctgtcgcccaggctagagtgcagtggcgcgatctcggctcactgcaacctctccctcccgggttttggcaattcttctgtctcagacttctgagtagctgagattacaggtgtgtgccaccatgcccagctaatatttgtatttttactcgagacagggtttcaccatctaggccaggctggtcttgaactcctgacctcatgatccacccatcttggcctcccaaagtcctgggattacaggcacgagccaccacacccagacttcttgttttattttttgagatgaagtttcgctcttgttgcccaggctggagtgcaatggcgagatctcagctcactgccacctcctcctcctcccaggttcaagtgattatcctgcctcagcctcccgagtagctgggattacaggcacccaacaccaaaccccgctgactttttgtatttttagtagagatggaatgtcaccatgttggccaggatggtcttgaacccctgacctctaatgatctacccgaattggtctcccaaaatgctgggattacaggcgtgagccactgtgcccagcccctcccatacctcttttggccaaggcagtacaattcagagaatcttgccagggaagactggtaaatggacatcaacatgatgcctatggctcctggtggatttagatacctcctggtgcttactgatacctttaccagttacatgggggcttttccatgccagactgaaaatgctggagatcactgatcaaccttcaactatttactagcagaacactgaggggactctgcagtcaccaatatctcctattgcacttggataaacacctcccgggaaatagagatgaatagaaaggaaatacttaaacaagcagaatggctacattccttcaaccagaagggtccattagtctgttttcacactgctataaagaactactggaaactggggaatttatgaagaaaagaggtttaattgactcacagttttgcaggctgtacaggaagcatggctggggagccctcaagaaactgacaatcacggcagaaggcgaaggggaagcaggcacgtttctggccatggtggagcaggagagacagagagagtgaagcaggaggtgctgcatgcttctaaacaaccagatcccatgagcgctcactcactatcacgagaccagcaagggggacgtcagccgccatgagccaatcatctcccaccaggtccctccctcaacactgggaattgcaattggacatgagatttggttggggatacagagctgaaccatatcaagggtagttcaaccactgagattgattgattgactgagatggggtcctgctctgttacctaggctggagtgcagtggcacaatctcggctcactgcaacctccgcctcccaggttcaagcaattctcctgcctcagcctccctagtagctgggactacagcacacgccaccacacctggctaatttttgtattttcagtagagacggggtttcaccatgtttgcccggctggtcttgaactcctgacctcgtgatcaccctgcctcggctcttcttttgctggaattacaggcgtgagccaccgcacccggacaaccactgagatttagaaggcagtcgagtccactataccacacctcacctggtttcttcctctgttggggcccctcgtggccactgttctgttactttttggtcctatttatttaaatggatggtgagctgtttgtcctccaggatccaacacttccaccttcagcttgtattacaacaataccagcctttcaagctactccgggtgaccccagaactcatctgaactcagaagcccaagagtttcattcctctcactttaggggactaagtgcccctggtcagcatgaagtcgatacagaagcatgacctccatccctaatccctcaagaatgaggagtggaaggtgttggcaggagggtgggacgcggtttgtaaatctgtaactgcatcagaccaaatctagttcaactttttttttttttgatggagtttcactcttgtcacccaggctggagtgcaatggcacgatctcagctcactgcaacctccacgtcctaggttcaagcattctgctgcctcagcctctggggtagctgggattacaagggtgcgccaccacgcctggctaatatttatatttttagtagagacggggtttcaccattttggccaggctggtcttgaactcctcgacctcaggtgatccacctgccttggcctcccaaagtgctgggattacaggcgtgagtcaccgcacccgaatcagttcaacttttatgtaatgaagttgtcagttgttttccaattgccatcgacctgcaggttgaaggtcatgtaccctgtgcatgcccaggttaaccacgcgtgccaccgtggagtggaacctaagagctcagcctgaagagctcggaccgatttaagaaccagacacccccaggcaggagccaggatccaatcagattgagttttggtgtcaccccatggcaggatccagtcagatcacacctcccagcattactttattgcaagatccaatcaaatcacacctcattaccctatgcttataaaacctgacacagcccccagctgtgtaagggagatttgagtacttcctcctgtgttcttgctggctgacttacaaaaaagctttaaaaaaaaaagccaggcgtggtggctcacgcctgtaatcccagcactttgggaggctgaggtgggcagatcacttgaggtcaggggtgcaagaccagcctggccaacatggtgaaaccccatctctactaaaaatacaaaaattagctgggtgtggtgacacacacctataatcccagctacttgggaggctgaggtaggagaatcacttgaacccaggaggcggaggttgcagtgagccaagatcacaccactgcactccagcctgggcgacagagtgagaagactccgtctaaaaaaaaaagttaaaattagcaccaaacgctttacaagtaaaaaaagtttttagctgcatatgtttaagtaactttttagattataagaaatacgcatgcaaaatggaaaggcacaaagaagagagcaaaaagtgcatgagatctcacatccaaggataaccgctgagaacatggaagtgctgactcttcagtctttatactatacacatttaggcctgttttgtttttataaaactgtaatcatataatacagacagttttataatctgctttttaaacacaacaattatataacatttagctgtttcatttgcattcaaattcataagggttccagtaactcatttatcagaaaaccaagagaaatattctcataaaaatataagtacataaggtcaggcatggtggctcacgcctgtaatcccagcactttgagaggccgaggtgggcggatcacctgagggcaggaattcaagaccagcctggccagcctggacaacatggtggaaccccgtctccactgaaaatacaaaaattagccgggcgtggtggcgcgcgcctgtaatggtagctactcagaaggctgaagcaggagaatcgcttgaacttggcaggtggaggttgcagtgaactgagatcgcgccactgcactgcagccagggcgccaaagtgagactccatctcaaaaaaagataaaaataaaaaataaaaaaaatgtatatatatgtatatatatttttccagacagggtcttactctgtctcacagtctgaagtgtagtgacgcaatcatagctcactgcagtctcaagttcctgagctcaggtgatcctcccacttcagcctcccaagtagctggaactacaggtgcatgccaccatgcccagtcaatttttttttttaatttttcatagagacagagtctcactatgtttcccagtcctaataaacattatgtgataaaaagaaaaaagtaaatcatcctgaagttaagtctttaatgagaaatgcaaataaagcatttctcaataaattatgggaagagaatcaactgaagaataaacatctttagtaaatcttttgctcatgtgcattaaccaatactcttgaaaaccaggattaatttactgtaccttcttaatattcctttgaaattccttatggcgcacaggtagcgtagaaaataactgcttcacgctgactgtggtccctctggggtgggggtagggggttttctggatgattttcccatcgtgatcaaacaccagtcgagtcccaaccttcgccgatacgtggcaggtagaaatggtgacatcactgtgagagaataccaggcatggtgtgttcagtgagagatccatgatgttgggcactgactactcttttcttcacttgcttttctctcaaaattttcttaaaaagctgatgatccctctgagataaccgagatctaaacggttgaggagtcatcacaaaatctaaggtctggcatctaaaagacagtgagacagagagcactaaacatgctttgttttgataaaagctttgacttcatttttcaggttgaattgcaaaaccataaatgatctcaagatttattgattctcaaatagagatttgttttgttattactcttcaaacaaaattttttaaaagaatttttttaaagaattttttaaaattttaaaaaatttttttaaagaatccaaaagatattataattaaaatgtatatgtagggcagggtgcggtggctcgtgcctgtaattccagcactttgggaggccaaggagggcagatcacttgaggcctggagttccagaccagcctgggcaacatggcaaaaccccatctctactaaaaatacaaaaattagccaggagtggtggtgcacgctatagtcccagctcttcaggaggctgagtcacgaaagtcacttgaacctgggaggcagagactgcagtgagctgagactgtgccactgcactccagcctgggtgacagagtgcgactctgtctaaaaaaaaaaaaaaatatatatatatatatatatatatgtatatatatatgtgtgtgtgtgtgtgtgcatgtaatcatttataaaaatttagtatctgtgctataattaaatagtgctttggtgaaatgtttccctaaaaattgataatgaaaaccaatggtaactatcatttattatctatatgttctgttcaaattgagaagttactgttttaataagggtaaccaattttttaaacaatactatttgcttcatttcattcatttattgctcacatttcagaagtactaggacttagattggcagtgagacaaaacagaattcagaagctagaagctgagatattgagatagaaaattgtaaataataatgattccaattaattttcagagaggtttttctaaggggtcaagtgaatggataaaaatattttatcacctcagtgcacaaagtgagctcagagcttccccccgaaagccaaaagtttcaacccgagttaggtcggcaaactcttgaatcttagatgtgtgatgtttcagagctgaaagagactgtaaagtaaggactaagacatctcaagtgctataacaacaaatatacatgatatctagtaactggctttagaaaactgtttttgtgtttcccaagacagtgttactcaaaattctaagacatgtggcccaattattttataataggattagaaagttaacttacttaagcctttaaagttttcttcttctaccccacatccattgcctgaaacttcaatgagatccattccatagtccttaagctttagatctagaaagtttaaaatatttatatatttattaaaaatggacccacgctatcagtttttatattgatattatttataacgtgcaaatttaagtgtcgtaactatacctttagttaaacatactagtgtcattttgtatatttcatttttataaagttctttctgaccatttactagcccagattaaatagtttagcattttctttctttcctctttttttttttttttccttacactagtcaagtgaagcagttggagtggagaaggaacaaaaaaatctgtaactggttgtgatcaattagttgtaaagaccgttgcactttgaccagccttttcctttgaaagaaataattttaacatacccagtaaggagaacgggggccgggcacagtggttcatgcctgtaatcccagcactttgggagaccaaagcgagcggatcacctgaggtcagtagttcgagaccagcctgaccaacgtagagaaactctatctctactaaaaatacaaaattagccaggcgtggtggtgcatgcctgtaatcccagctacttgtgaggctgaggcaggagaatcgcttgaacctgggaggtggaggttgcagtgagttgagatcgtgccattgcaccgcagcctcggcaacaagagcaaaactctatctcaaaaaaaaaaaaaagaaaaaaaaacagaactggttctggaatcagacttcctagattctattttattagctttataatctcaaaaaaaggaaatttactgtcccttaatttcctcaactgtaaaatggaggtaataagttctatctcataaagttatttggcagattaataattttttttttaattttgtcattttcttttttttctttccttttttttttttttttaattttttgagatggacttttgctcttgtcacccaggctggaatgcagtggcacaatcgatcttggctcactgcaacctccacctcccaggtttaagcaattctcctccctcagccttctgaggagctgagattacggccatgcaccatcacatctggctaatttttgtatttttagtagagacagggttttaccacgttggttaggctggtcttgaactccggacctcaaagcatcagcccccctcagcctcccaaagtgctgggattacagatgtgagccactactccaggatttattttattttattttattttatttttttgagacagagtcttgctctgtccccaggctggcgtgcagtggcacaatctcggttcactgcaacctccacctcccaaatttaaacaattctcattcctgagcctccccagtagctgggattacaggcttctgccaccaggtctggctaatttttgtatttttagtagagacagagtttcaccattttggacaggctggtctcgaattcctgacctcaggtatccacccgccttggcctcccaaagtgctgggattacaggcgtgagccaccacacccggcctgctttattttttaatagagacgaggtctccccatgttggccaggttggtcttgaactcttggcttcaagcaatccccccacctcagcctctcaaagggctaggattacaggcgtcagacaccacgcccagctattctgcaaattaaatgagatatttctgtgcaattcttagcataacacctgcctggcacaccataagaacacaagaaaagctgtcgttattattattactacctagctaagtactaggcacataataggtgctaactttaacttaaaaataatagtttattactacatcaacacttgatagtcttatttcaataacaaatgtttcttgactacaacaacattcactgatcatttcttgtggcttaaaactctcccaaacttaccaatattagtggcaccagcatccagactgttttctactatcttcttcaccgcagtgcttagactcagtaccacctgcccagagcaaatctgatggactgacttccgatcaataggtttgatggccttagcaggttctgtactaaagaaatcagttacaagaaacaaagcaagtattcagctatatattttcatcctgattttaactgtgggaaatgactcaacactgcaaatagtttatggttctaatctattcatttattatattaacaaatacatttattatatccagaaatggaaacattgttttacaatccttaaacaagtacccaaaatacttctggatagacacttcaaattcaacacatccttactatctagtatccacatggagaaaacatacattgtatctctcaaattaccaaaatctttggcaataatggtgtcttctttcttgaaaactgaaagcatggccggtgtggtggctcatgcctgtaatcccagcaatttgggacacagaggcaggcggatcacttgagatcaggagtttgagaccagcctggccaacgtcgtgaaaccctgtctctaccaaaaatacaaaaaattagccaggcatggtggtgggcgcctgtaatcccagctatttgggaggctgaggcagaagaatcacttaaacctgggaggcggaggttgcagtgagctgagattgcagcattgcacgctaggctgggcaatgagcaaaaaaaaaagtaaaagcaacataatttcccacataattagaaaaaccaacagtatgctgggaaatacacaatgtttaagtcaaaatcatctcagaaattggataccagttatataactattccttatacacagttgcctttgataccctactccaaattgaagctgccagctgctgtcttagcaaagaccctcaaagttcttgctgtacttgttttaagagtttttttttttttgtttttgtttttttgagacggattcttgctctgtcgccctgtcgcccaggctggagtgcagtggcacgatcttagctcactgcaagctctgcctcccgggttcacaccattctcctgcctcagcctcctgagtggctgggactacaggcgcccaccaccatgcccagctaattttttgtattttttgtagagacagggtttcaccgttttagccaggatggtctcgatctcctgacttcgtgatccgcccgcctcagcctcccaaagtgctgggattacaggcgtgagccaccacgcccagcccactttaagagttttataacggtttcatttccccttattccctgctccaacccatcctccactctatcaccagagctatttttgaaatcacgaatctggtcaaataatttttctgcttgaaaaattactagtgccccacttcctactatatgaaacttaaaatctagtcatcactgggccccaaactaccttcttttcagaatctctccgatcctttcccttcatcaagtcccctacattattattattattattattattattattattattattattatttgagacagagtctcaccctgtcacctgggctagagtgcaatggcatgatctcggctcactgcaacctccacctcccaagttcaagtgattctcctgtctcagcctcccaagttgctgggattataggcatccaccattacactcagctaatttttgtgtttttagtagagatggggtttcaccatgttggccaggctggtttctaactcctgacctcaggtgatctgcccgccttggccttccaaagcactaggattacaggtgtgagccaccgcaactggccgtcccctatattgcagcacagtgaacaactgtttcctgaacatcacaagctctcttagacactacagtgtataagcaggtctctgtctaaactgctctcctcttgcccctctgcccaaccaatgtctgctcatccaaagaatgtatcccgtgtgttcattaacttagcaagttcccagtaaacagtttaattgatcactcgttaagagaaggcgggaaacctccatgaaaagagaaatcagtgggtatttcctacagcatttaacacatcgtaggccttcaataaacccttgtgaaataaacaaacctctttactcttcattctatgttgctaagaatctcacctaagtctgtctaccatgtgaaactgcagatgacctcacagaaaatggaaagaagtatctctaaaaataagtttatttggcaacacactacaggctacaggttcacttctgattttttttctttttttttttgagatggagtcttgctgtgtcacccaggctagactgcagtggtgcaatctcagctcactgcaatctctgtctcctgggttccagcgattctcctgcctcagcctcccaagtagctaggattacaggcgcctgccaccacgcccagctaatttttgtatttttagtagaaatgggatttcaccatgttggccaggctggtcgtgaactcctgacctcatgatccacttgccttggcctcccaaagtgatgggattataggtgtgagccaccgcacctggtccacttcagatatttagatacagacggcaaatttatttaaatgtctcaatacatttaaatgtagttacctaaatatatctaatatatttaaatgcagagagcaaatttgcgtttacaaatctgacatggaattcaactgtgctagccaagattcggtgtagcttaccagccagaaatcacataccctaacaggtaaaaatgcattgcattttttaaaactgagcagctacgcaaattaggatatgtctggatgctctactgtccccaaaataacctcaatttttttttaaaaggccaggcacagtgcattacgcctgtaattccagcgctttggggggccaaggcgggcggactgcttgagctccggagttccagaccagcttgggcaacatagcgaaatccccgtctctacaaaaaaataaaataaaaattaaaaataaaataatataaaaataaaaataaaaggggagggagaacaggtagaaaggaaatgcattcagtctatggggatttcacgttccggcttcaagtccacggccctgtgatgggatgtgggcagggcctgagacaggccgaacccaactcttcacagggccgaattctttgcccgcagcccagcaccccgaaggagcttgcctcggcttcaaggcgcacctaatgggcaccggatcgctggggcgctgaggatgccgctccggggcctccacgaggtgacctcgccacgcgcctcggccatgttccccccatttccagggaggttggaagccgtggttctcaaagagggcgcgcgagaggggcgaccgcgagcccagctcacctccagctctcagctctctccaaggatgcaacaccggatccgcctcggggactgggaaagtgccctccacggctcccacaggcgccccgcctcctg

SEQ ID NO: 264 - DNA, 23603 bp, Homo sapiens
tttagagatgggctcttgctatgttgcctatactggtcttgaactgctggcctcaggcagtcttcctcccttggccacccaaagagatgggattacaagcatgagccactgtgcacagctgagatttttcgacttagtctttttgtacacccagtatcttatagaatatccgtaatatagattcataaataaaccatttccttcaatggtataaataaataaaccactgctataaatggtggaattttctgagttaagagcaatacatatgatacaaaacttgatatatagagtttcttagccaaactggaggggctggctttaggtgatccgtggactccctgaaattggggacaccattggaaatatgtgtgaactcatgggcagtttcctatgatttccagtcctcaaagtatctcttggactcaaagatgccttagggcagaggacgcgtgtacccccagtacagaatctcggacagtgaatgtcagtagacattcggcagaaaacctctgccaaattgagtgctctgatgtgactttttcatcaagtcaatgttcctgggatctcttgtacatgataatctcactcttgtaaggtttcatcgtttctgcttaccctacttttctttcccatcctgatccctctcccaccagactggactctgaaacgggcatgtacagagaagaggagaccccaacacgcttcaagctttgagtggagaggacacagcctctgctgggacagggaacagagggatgcggagaccctgaagatgcttttggacagtggtctgaggttgggacagtggcaggagataccattcacccaggatctccaggacaagagatcagcctggcagttacatgtgttttttttcaaactggttgccaggttggcatgagcgatgacatcagagattccgaccttcctgattggagggaccggactctgtcggcacctgggagttcagttggacaacagtaacttctcagagctgttctccactcctgacttctcccagcctcgagaattgataacacactcttctggatcccagcagtgtccagaagaagatcaaggacagaacagagactaggtttggtgagatgggacagattttgggaaagatcatgatgagccatcaaccgcagccccaggaagagcagagcccccagcggagcacctcagggtaccccctccaggaggtggtggatgatgaagtgtcgggaccatcaggtgaggggactggaggaagaagaggtggcataggattgactaagatgaaggaagggggccaggcgtggtggctcacccctgtaaccccaacactttgggaggctgaggcgggcagatcacctgaggtcaggagttcaagaccagcctggccaacatggtgaaaccccatctctactaaaagtacaaaaattagccaggcggtagtggtgtgtgcctataatcccagctacttgggaggctaagacaggagaatcacttgagcctgggaggaagaggttgcagtgagccgagatcgtgctactgcactccagtctgggtgacagcgtgagatgctatctcaaaaaaaaaaaaaaaaaaaaaaagaagaaaaaaaagaagggtcagaggtcaggaaggagaacctggggagggtgtgtgggaagaatggagaaattcaggctgggtgcagtggctcacacttgtaatcccagcactttgggaagccaaggcaggcggatcacttgaggccaggagtttgagaccagcctggccaacatggtgaaaccctgtctctattaaaagtacaaaatggagctgggcattatggcaggcacctgtaatcccagctacctgagaggctgaggcaggagaataactggaatccgggagatggatgttgcagtgagctgagattgcaccactacactccagcctgggtgacaaagcaagattctgtctcgaaacaaaaaaaaaaaaaaaagagggactcagagagccagggaccagggaaggatatgaggcagtgttctgaggacagagagagggaagaatggggaggggaaggagtggcacatggggttgagcagaggagaaagtcagaaaggtggcttggagaagccagcagtctgcgaggctggggaggatggagagtggtttggggtttggggtcggggtctaacgtgatcagttgcagaagcattacacggtggcctggtttctttactcagcccctggggtagatcccagccccccacgtaggtcccttggctggaaaaggaagagggaatgtttggatgaatctgatgatgagccagagaaggagctcgcccctgagcctgaggagacctgggtggcggagacgctgtgtggcctcaagatgaaggcgaagcgacggcgagtgtcgctcgtgctccctgagtactacgaggccttcaacaggctgcttggtaggaggacaccccagagagcacctccaatcctgttctttctaaagaggaaacttccaataaccacacttttccaatgggaaaaatatgccccagtgggtgagctctccatgcgggaggactctgaagtgatcactcatgagggacacttaaggagacaacagaggattaggtagacttgataaaggtcggtgcttgggataagaaagcttggttttgggccaggcgctgtggctcccgcctgagatcccagcacgttgggaggctgaggcaagaggattgcttgaactcaggactttgaggctgcagtgagctatgactgcaccactgcactccagcctgggtgacagagcaaaactctgcgtcaaaagaaaaaccaaggctgggcacagtagctcatccctgtagttccagctactcgggaggctgagacaggagaactgcttaaacccaggaggcagaggttgcagtgagccaagatcaggccaatgcattccagcctggcccacagagcaagactctgtctcaaaataaattaataaataaataaaaataaaaatcaaataaagaaaaacaaaatcaaaaatcaaaaaagtggtttcagctgtgccctctgaaacttaatgtttcttactgacttttctaaacctaagtgtctccatccatagtgagggatcccaaggccatggtcacaccctgatgtgtgactgtctcatgaggaaatgatgggaattcctttatgactctgcagtggtccctccatgtctgctggagggggtcctggctgattcccagctctacatcctgtagattctcacacccagggcctccttcggcctcttctcaggggagtctcagagcaggagcctctctcccttgcccagtgaaagtcattctcccctctcccatccacctcacccgcagccacaatcctgagactttcccccgggaggcacacttctcctcgctgccctgctgctctcacggaaaccctgtcctgcttctcacactgacatctgctctctaatcacagaggatcctgtcattaaaagactcctggcctgggacaaagatctgagggtgtcggacaaggtaaggttgttctctatgtaactgtgttcctgttctaacgcacggccagggggagggcgcagcttccaaacccacagttctccctccaccacctcccaccagatgctcctacagtttttttttgtttttgtttttgtttttgttttgtgagacacagtcttgctctgttgcccaggctgaagggcagtgtctcgatcttgactcactgcagctgatgcctcctgggttcaagcgattctcccacctcagcctccaagcagctgggattacaaacatgaaccaccacgcctggctaatttttgtgtttttagtagagacggggttttgccatgttggccagattggtcccgaacacctgacctcaggtgatccacccgccttggcctcccaaagtgctgagattacagacgtcagcactgtgtctgaccagctcccatggtcttgagtcttggcacccacacatttttttttctgagacaagagtccagctctgctccccaggatggagtacagtggcatgatcatagctcactctaattcctgggctcaagcaatcctctttccttagcctcctgaggagctgggactaggcacatgctaccatgctcaactaatttttgaaatcttcgtagaaacagggtctcgctgtgttgcccaggttgttctccaactgttgggctcacatgatcctcctgtctccacctctcaaaaagtactgggatcacaggcttgagctgccactcccggctattctttgtctttttatgattcgtcagcatctccgtcaggattctgctggtctcttgcagagtgaatgagtggcccctgcctcccctatgagtcctttgggatctgagccctgggccacagtctggctgcagccctgaagctcctgggccctctactctcagctccttgggacagttctctgcctggcacacaaaagaccctcctgacaccagccgacctagacacaccccctccaaagatcccatcggagcccaccatcctgggagcatcaccgaaaacccttcctccggcttctcggatttgcatccgaccttcgaatacccctccaccccgcaatttccacatgagcacagtcaccccaatgctgaggtcccttctctgatgggcagcccctccccagacccccattccactatctccacaatcttcctctcccaagatgtgacctctccctctctgtgttcctttctctccatcagtatctcctggctatggtcatagcgtatttcagccgggccggcctcccctcctggcaataccaacgcattcatttcttcctggctctgtgagtggtttgctgcctcctatccatcaatatccaatgccctgggacagcgggggaagtgggattccagcctttcatttattctttcacctatttgtcctctttactctgtgtacaaaaaagacaggattatagtatcttagactgttatttctaaaaagaaactcaggctgtgcatggtggctcaggcctgtaatcccagcactttgggaggctgaggcaagcggatcacctgaggtcaggagtttgagaccagcctggccaacatggcaaaaccccgtctctactaaaaatagaaaaatcagtcgggcatgttggtgtgcacctgtaatccaagctacttgggaggctgaggcaagagaaccccttgaacccaggaggtggaggttgcagtatgctaaggttgagccactgcactccagcctgggcaacagagtgagactttttctcaaaaaaaaaaaaaaaaaagccaaaaaaaaaaaaaaaaacaggcaaaaaaaccaaactccaatgccagtgtacaaatacaagagtaaaacaggccaggtgcggtggctcacgcctgtaatctcaacagtttgggaggccgaggtgggcggatcacaaggtcaggagagcaagaccatcctggctaacatggtgaaaccctgtctccacttaaaaaaaaataaatacaaaaattagccgggtgtggtggcgggcgcctgtagtcccagctactctgaggactgagggaggagaatggcgtgaacctgggaggcggagcttgcagtgagccgagatcgcaccactgcactccagcctgggcgacagaatgagactccgtctcaaaaaaaaaaaaaaaaaaaaaaaaaagaacgaaaaacaaaaggaaccatgaaccgctcctaaggggagaagaaaaggagcggaggagcggacatgacacttcccccagcaagcagacgtttccggttcttctctctctctccttcccacatcaaccgcaaaagccatcagcctcctccgggttcccgtgacagaggtcacagtccaggtcccccttgcatcactcgaatccactgtcaaatgctccctgctggggtttcctggagtctctccccaagccagggggcttcctagtgcagcctgaacatctttccaaagcacgacaacctcactgcccacctgaacaacttccttagctgatgtctttctctatcgaggccagggtccacagtgccaattccaccctctctacaatctctacaaccacactggctcgccatcttggtgtttcctggcttggcttcactgctccttccaaatgccctccacttgactttgcatttgtgttttctgtctgggtgtcccacacacatgtggttctgaagggaaggacccattccttgaagtcggttcaccccacagcctctgtgatgccttccctcatcttccaacttctgcatgaccgtagctctccagttacatcctgttataacgtgacattgggattaggtcatctcccctgattactcccagtcccattagactagatgcctgtagaaggcagggtcctggcaaaatatcagtgtattcaattgctttttttttttttgagacagacttgccctgtcccctaagctggagtgcagtggtgagatcatagctcaccgcagcctccatatcctgggctcaagcgatcctcccacctcagcctcttgattagctccgactacagggctgtaccaccacacctggacagttatttatttatttatttatttatttatttatttatttatcaagacaagagtgttgctgtgtctctcaggctggaatggaggggcccaatcttggctcactgcaacctccgcctcctgggttcacacaattcttatgcttcagcctcttgagtagctaggactaatgggtgtgccaccgcaccaggctgatttttgtatttttagtatagatggggtttctctgtgttgaccaggctggtctcaaactcctggtctcaagcaatccacctgcttcagccttccaaagcgctgggattacaggcatgagccaccgcgtctggtgtattttttatatttttaatagagacgagggtcttgctatgttgcccagggctgtctcaaactcctggcctcaagtgatcctcctggttcggcctcccagtgtgctgggattccaggcataagccaccactcttggtcaccagttgggtttttgtctccatcctgaaggagtgggagacgcccttgatcaggtctctgtccagcagagccctcctgaggaaggcatggctctctgcagggtgggtgccagtcctgagctagggacggtcccttaccttcctctctgagaagctgacctcagccggaggtctctcctggtggtgcccctgagcagcaacctgatttctgtcctcagctatctggccaatgacatggaggaggacgatgaggcccccaaacaaaacatcttctacttcctgtacgaggagacccgctctcatatacccttgctccgtgagctttggttccagttatgccgttacatgaacccgagggccaggaagaactgctctcagatagccttgttccggaagtatcggttccacttcttttgttccatgcgctgcagggcttgggtttccctggaggagttggaagaggtgggtggggcctggggacgtggaggatgtggggaggaatcgggtgggctggaggctggacgaggggagagaggggtatcctggggagtccccgtcttctcaaagcgcgtttgtttttccagatccaggcttatgacccagagcactgggtgtgggcgcgagatcgcgcccacctttcctagagctccagggaccgtggaggcctgaggtcatcggcctgagagaaggtacatctgcatcctccggggtaaaggcagaatattggggtctatttcggaaatccaaggaacccaattgcttgatctggcttcaagcctgggcaacgtggcgagatcccctctccacaaaaatacaaaaattagccaggcgatgtgggaggcatctctactcccaactactcaggaggctgaggcgggaggatcgctggagcctgggaggtcggggctgcagggagccctgatcctgccactgcactccagcccgggcgacagagtgagaccctgcctcaaaaataatcataaatactgagttcggggaggttcattatgattgatgcacttgagttaccgatctgggtcgagggttcagtgaagctttggtttacatcttgtgcagctaaccatgttgagcacagagcatgagactttgtcatgaggagggaggattatggattaggcttctggactcgtggttcgtgatgttgtcacgttagaaacagatctagcacggttacaagtttagatctgaagtgacacaaaaggccccagctgtgatgaagtccaaagccacattctctgagggtgccctactccctgggaagacccacccaaagtccttgctatgaagcagatcactggggctgaccttgggtgtattaagttttggagtcagggtcaccaaagtgtgagtttcacagttgaacacgatggttcagaagcagggtatagaatgaaaggcaggagataaaattgcacttctcaattgctctgaactctagctagacttgacatgggacgtgaataaccttcctgtctagagagctgcctccttgaagtgtgacattgtctctctcacttccagaacaccggacccaggggagatgtggattttcagcaggaactttattccaatgctaatggcagacatcaggaaggaggagaggaaccatttgtgcagatcatctagaagaacctggaccattcttgacagagctgaatacagtgatcacgttgtcctccaaggagcaggggtggggtggggtacttctaggagtccttggagaaaagtaagaaaccaggagtgtttccagttccaccctttcctgcggcaccacctccctttttatattgctgaatgccaacctccctggggcggaacctggaggtcctgtttcttatggacttggttgccacagtccaggagcatttgaaggcacagtgcaggggctcagattggcacagaattctttgtgaaatatgagtgccacagactgtaacagatagcttcatgcacactatgcattttattggtttgtttggaaaatgttggccattgaattattaataggtttatttcaaatagtttggaaattgttgtacttttgaaaacatgctgttcctgtagagttttttgatgagagttatagttgttatatatacctaaagataattttcttttcatttttaagtgagaattctttttatcctaaatcttttattatctttaaatttttttctgtattattatatgtgctcctgaagcgagcactctttttatctatgatacttccataataatctcttctatttatagctattggtagttccccaccagaaaaaaacataattctggtgatagaaatttttatttgctgtttaggtttgtgactgaattgtgagaattcagttgtgatttttaacatgtctcagatatatatactaacacgtctaatatatactatctattttattggtttattttgaaaaacatgggtatagaattatttaaatattattttatttattgaaatatttattaaatatgtttatttatttaaatattattattactttaaatattattttaaatattttggaaatactggtatttttgaatagatgctgtttctacaaagctgtgtgatgggtgttataactgttgtatacacatacatataattttgttttcctttttaagagaggattcttttcatcctaaatcttttacctttcaatctttgtatctattattacacgtgctgctgaaggggagcatggtttttatctatgatacttagttaacatatatattacatttatagctatgtggtagttcccctaaattcttgtaaaaataaatttttatttgatatttagtgtatgtttgaaatgtgagaattcagatggaattttttatcttgttttggcatgtttgtatgttactttaaagaggatgtgtgttctaaaggaggacatgagctgtgtgttttcaagagaacagtgcagtgcatctcttggggaaacataataaagatgaacttttctcaccttcacagtgagtgtgatcatattgtggtctggattgattatttgctgtcaagtgacatttttccttaatggggttgtgcttatttgaacatatttattagctttggaagataatcctgtgctgttttttatgtagaaaaaaacatacggctgggtgcagtgctcacacctacaatcccagcagttttggaggtcatggcgggaggatcacttgaagcctatttttaatttttattttttaaagaaaaacaacagaagagaaggctgatcccaagctacagggtttttttgtttgtttgtttgttttggagacagtctcgctctgtctcccaggctggagtgcagtggcacaacctcggctccctgcaactttcacctccgcgttcaagcaaattctcctgcctcagcctcccaagtagctgggactacaggcatccgcctgtacgtctgactaacttttgtaaaaatagtagagacaaggtttcaccatgttggccaggctggtctcaaactcctgacctcaagtgatccacccgcctcagtctcccaaagtgctgggattataggcatgagctactgtgcccagaccccaagctagagttttaaagcaggaaatgagagaaagatattgagagaggaaaaccaggtggtaagaaaactctaaaggtggctgggcgtggtggctcacgcctgtgatcccagcaggagttcgagaccaggcaggagaatcactagcagagaatatgtctccccaacccctctcaaaaaaaaaaaaaagtccaggcgcggtggctcaggactgtaatcccagcactttgggaggctgaggtgggcggatcatgaggtcaggagatcaagaccatcctggctaatacggtgaaaccccatctctgctaaaaatacaaaaaattagctgggcgcggtggcaggcgcctgtagtcccagctactccggaggctgaggcaggagaatggtgtgaacccaggaggcggagcctgcagtgagcagagatcgcgccactgcactccagcctgggtgaaagcgcgagactccatcacaaaaaaaaaaaaaaaaaaagaaagaaaaaaagaaagttcctgcaacagttcaagctgtgaaagacaggcactctgccatgcaattctttgtgatttttcttttttatttttggagtcggggtcttgtgctgtcacccagactggggtgcagtggtgcggtcatagctcactgtgggctcagactcaagctcaagcaatcttcttatcttgcctttctaattgctgggattataagcatgagccactgcacctggcctgtgtgacgtaattctgatgtcaactccctgatgttacatcaaatgccacaggttaaggccaccagcccccgctaggctgccctcgcttcagatgcagctgcaagcttgggtgtccacagaccgcatgtacttctcaccaactggctgcaaatttggaggttcccaccacgtcctcaggtttgataattcaccataacaacccacagaactctgaaaagcatgatactttctctttctttatttgagacagagtcttgctctgtcacccaggctggagtgcagtggccaccatgcttggctaattttagtatttgtattagagacagggtttcgccatgttggccaggctggtcttgaactcctgacctcaggtgatccgcccaccttggcctcccaaagtgctgggattacaggcatagccactgtgcctggctgacttctagagtttcaataacagagatgtggttcaagaagaaaagggagacatgttttgtagacagcaggagcttcatgaaaagaagccaatgaagggcaggatgtgtagctgtctacctacaggaaaccagccaggagcctccccacagggacttcagcacagacggctgggaaaatctgcattcacctgagctctggacctaagagaggacaaggccttgactgtttctacagactcacaagacgcaatctctgcagtccatgcccgtggtgtgatctgggaaacagggggccttctaaatgccaacagcaaggaaatcaaatgtgcaacagacagaaatatcggcattgacacgggccatggaaaggcctaaacagatgactgcagtccactgccaaggtcatcaaaggggtgactctgaaataataaatttcagacgccacggcccaaatagctgcacgaggtggggaagtcctccacatgcctctgcttccttcagtacctcttcatgaaataagctgaggtacttccctggggaatttcctttctctttctttctttcgagatggagtcttgctctgtcgcccaggctagagtgcagtggcgcgatctcggctcactgcaacctctccctcccgggttttggcaattcttctgtctcagacttctgagtagctgagattacaggtgtgtgccaccatgcccagctaatatttgtatttttactcgagacagggtttcaccatctaggccaggctggtcttgaactcctgacctcatgatccacccatcttggcctcccaaagtcctgggattacaggcacgagccaccacacccagacttcttgttttattttttgagatgaagtttcgctcttgttgcccaggctggagtgcaatggcgagatctcagctcactgccacctcctcctcccaggttcaagtgattatcctgcctcagcctcccgagtagctgggattacaggcacccaacaccaaacccagctaactttttgtatttttagtagagatggaatgtcaccatgttggccaggatggtcttgaacccctgacctctaatgatctacccgaattggtctcccaaaatgctgggattacaggcgtgagccactgtgcccagcccctcccatacctcttttggccaaggcagtacaattcagagaatcttgccagggaagactggtaaatggacatcaacatgatgcctatggctcctggtggatttagatacctcctggtgcttactgatacctttaccagttacatgggggcttttccatgccagactgaaaatgctggagatcactgatcaaccttcaactatttactagcagaacactcaggggactctgcagtcaccaatatctcctattgcacttggataaacacctcccgggaaatagagatgaatagaaaggaaatacttaaacaagcagaatggctacattccttcaaccagaagggtccattagtctgttttcacactgctataaagaactactggaaaccggggaatttatgaagaaaagaagtttaattgactcacagttttgcaggctgtacaggaagcatggctggggagccctcaaggaactgacaatcacggcagaaggcgaaggggaagcaggcacgtttctggccatggtggagcaggagagacagagagagtgaagcaggaggtgctgcatgcttctaaacaaccagatcccatgagcgctcactcactatcacgagaccagcaagggggacgtcagccgccatgagccaatcatctcccaccaggtctctccctcaacactgggaattgcaattggacatgagatttggttggggatacagagctgaaccatatcaagggtagttcaaccactgagattgattgattgactgagatggggtcctgctctgttacctaggctggagtgcagtggcacaatctcggctcactgcaacctccgcctcccaggttcaagcaattctcctgcctcagcctccctagtagctgggactacagcacacgccaccacacctggctaatttttgtattttcagtagagacggggtttcaccatgtttgcccggctggtcttgaactcctgacctcgtgatcaccctgcctcggctcttcctttgctggaattacaggcgtgagccaccgcacccggacaaccactgagacttagaaggcagtcgagtccactataccacacctcacctggtttcttcctctgctggggcccctcgtggccactgttctgttactttttggtcctatttatttaaatggatggtgagctgtttgtcctccaggatccaacacttccaccttcagcttgtattacaacaataccagcctttcaagctactccgggtgaccccagaactcatctgaactcagaagcccaagagtttcattcctctcactttaggggactaagtgcccctggtcagcatgaagtcgatacagaagcatgacctccatccctaatccctcaagaatgaggagtggaaggtgttggcaggagggtgggacgcggtttgtaaatctgtaactgcatcagaccaaatctagttcaacttttttttttttttgatggagtttcactcttgtcacccaggctggagtgcaatggcacgatctcagctcactgcaacctccacgtcctaggttcaagcattctgctgcctcagcctctggggtagctgggattacaagggtgcgccaccacgcctggctaatatttatatttttcgtagagacggggtttcaccattttggccaggctggtcttgaactcctcgacctcaggtgatccacctgccttggcctcccaaagtgctgggattacaggcctgagtcaccgcacccaaatcagttcaacttttatgtaatgaagttgtcagttgtttttcaattgccatcgacctgcaggttgaaggtcatgtaccctgtgcatgcccaggttaaccacgcatgccaccgtggagtggaacctaagagctcagcctgaagagctcggaccgatttaagaaccagacacccccaggcaggagccaggatccaatcagattgagttttggtgtcaccccatggcaggatccagtcagatcacacctcccagcattactttattgcaagatccaatcaaatcacacctcattaccctatgcttataaaacctgacatagcccccagctgtgtaagggagatttgagtacttcctcctgtgttcttgctggctgacttacaaaaaagctttaaaaaaaaaagccaggcgtggtggctcacgcctgtaatcccagcactttgggaggctgaggtgggcagatcacttgaggtcaggggtgcaagaccagcctggccaacatggtgaaaccccatctctactaaaaatacaaaaattagctgggtgtggtgacacacacctataatcccagctacttgggaggctgaggtaggagaatcacttgaacccaggaggcggaggttgcagtgagccaagatcacaccactgcactccagcctgggcgacagagtgagaagactccgtctaaaaaaaaaagttaaaattagcaccaaacgctttacaagtaaaaaaagtttttagctgcatatgtttaagtaactttttagattataagaaatacgcatgcaaaatggaaaggcacaaagaagagagcaaaaagtgcatgagatctcacatccaaggataaccgctgagaacatggaagtgctgactcttcagtctttatactatacacatttaggcctgttttgtttttataaaactgtaatcatataatacagacagttttataatctgctttttaaacacaacaattatataacatttagctgtttcatttgcattcaaattcataagggttccagtaactcatttatcagaaaaccaagagaaatattctcataaaaatataagtacataaggtcaggcatggtggctcacgcctgtaatcccagcactttgagaggccgaggtgggcggatcacctgagggcaggaattcgagaccagcctggccagcctggacaacatggtggaaccccgtctccactgaaaatacaaaaattagccgggcgtggtggcgcgcgcctgtaatggtagctactcagaaggctgaagcaggagaatcgcttgaacttggcaggtggaggttgcagtgaactgagatcgcgccactgcactgcagccagggcgccaaagtgagactccatctcaaaaaaagataaaaataaaaaataaaaaaaatgtatatatatgtatatatatttttccagacagggtcttactctgtctcacagtctgaagtgtagtgacgcaatcatagctcactgcagtctcaagttcctgagctcaggtgatcctcccacttcagcctcccaagtagctggaactacaggtgcatgccaccatgcccagtcaatttttttttttaatttttcatagagacagagtctcactatgtttcccagtcctaataaacattatgtgataaaaagaaaaaagtaaatcatcctgaagttaagtctttaatgagaaatgcaaataaagcatttctcaataaattatgggaagagaatcaactgaagaataaacatctttagtaaatcttttgctcatgtgcattaaccaatactcttgaaaaccaggattaatttactgtaccttcttaatattcctttgaaattccttatggcgcacaggtagcgtagaaaataactgcttcacgctgactgtggtccctctggggtgggggtagggggttttctggatgattttcccatcgtgatcaaacaccagtcgagtcccaaccttcgccgatacgtggcaggtagaaatggtgacatcactgtgagagaataccaggcatggtgtgttcagtgagagatccgtgatgttgggcactgactactcttttcttcacttgcttttctctcaaaattttcttaaaaagctgatgatccctctgagataaccgagatctaaacggttgaggagtcatcacaaaatctaaggtctggcatctaaaagacagtgagacagagagcactaaacatgctttgttttgataaaagctttgacttcatttttcaggttgaattgcaaaaccataaatgatctcaagatttattgattctcaaatagagatttgttttgttattactcttcaaacaaaattttttaaaagaatttttttaaagaattttttaaaattttaaaaattttttttaaagaatccaaaagatattataattaaaatgtatatgtagggcagggtgcggtggctcgtgcctgtaattccagcactttgggaggccaaggagggcagatcacttgaggcctggagttccagaccagcctgggcaacatggcaaaaccccatctctactaaaaatacaaaaattagccaggagtggtggtgcacgctatagtcccagcacttcaggaggctgagtcacgaaagtcacttgaacctgggaggcagagactgcagtgagctgagactgtgccactgcactccagcctgggtgacagagtgcgactctgtctaaaaaatatatatatatatatatatatatatatatatgtatatatatatgtgtgtgtgtgtgtgtgcatgtaattatttataaaaatttagtatctgtgctataattaaatagtgctttggtgaaatgtttccctaaaaattgataatgaaaaccaatggtaactatcatttattatctatatgttctgttcaaattgagaagttactgttttaataagggtaaccaattttttaaacaatactatttgcttcatttcattcatttattgctcacatttcagaagtactaggacttagattggcagtgagacaaaacagaattcagaagctagaagctgagatattgagatagaaaattgtaaataataatgattccaattaattttcagagaggtttttctaaggggtcaagtgaatggataaaaatattttatcacctcagtgcacaaagtgagctcagagcttccccccgaaagccaaaagtttcaacccgagttaggtcggcaaactcttgaatcttagatgtgtgatgtttcagagctgaaagagactgtaaagtaaggactaagacatctcaagtgctataacaacaaatatacatgatatctagtaactggctttagaaaactgtttttgtgtttcccaagacagtgttactcaaaattctaagacatgtggcccaattattttataataggattagaaagttaacttacttaagccttcgaagttttcttcttctaccccacatccattgcctgaaacttcaatgagatccattccatagtccttaagctttagatctagaaagtttaaaatatttatatatttattaaaaatggacccacgctatcagtttttatattgatattatttataacgtgcaaatttaagtgtcgtaactatacctttagttaaacatactagtgtcattttgtatatttcatttttataaagttctttctgaccatttactagcccagattaaatagtttagcattttctttctttcctcttttttttttttccttacactagtcaagtgaagcagttggagtggagaaggaacaaaaaaatctgtaactggttgtgatcaattagttgtaaagaccgttgcactttgaccagccttttcctttgaaagaaataattttaacatacccagtaaggagaacgggggccgggcgcagtggttcatgcctgtaatcccagcactttgggagaccaaagcgagcggatcacctgaggtcagtagttcgagaccagcctgaccaacgtagagaaactctatctctactaaaaatacaaaattagccaggcgtggtggtgcatgcctgtaatcccagctacttgtgaggctgaggcaggagaatcgcttgaacctgggaggtggaggttgcagtgagttgagatcgtgccattgcaccgcagcctcggcaacaagagcaaaactctatctcaaaaaaaaaaaaaagaaaaaaaaacagaactggttctggaatcagacttcctagattctattttattagctttataatctcaaaaaaaggaaatttactgtcccttaatttcctcaactgtaaaatggaggtaataagttctatctcataaagttatttggcagattaataattttttttttaattttgtcattttcttttttttctttccttttttttttttttttaattttttgagatggacttttgctcttgtcacccaggctggaatgcagtggcacaatcgatcttggctcactgcaacctccacctcccaggtttaagcaattctcctccctcagccttctgaggagctgagattacggccatgcaccatcacatctggctaatttttgtatttttagtagagacagggttttaccacgttggttaggctggtcttgaactcctgacctcaaagcatcagcacccctcagcctcccaaagtgctgggattacagatgtgagccactactccaggatttattttattttattttattttattttatttttttgagacggagtcttgctctgtccccaggctggcgtgcagtggcacaatctcggttcactgcaacctccacctcccaaatttaaacaattctcattcctgagcctccccagtagctgggattacaggcttctgccaccaggtctggctaatttttgtatttttagtagagacagagtttcaccattttggacaggctggtctcgaattcctgacctcaggtatccacccgccttggcctcccaaagtgctgggattacaggcgtgagccaccacacccggcctgctttattttttaatagagacgaggtctccccatgttggccaggttggtcttgaactcttggcttcaagcaatccccccacctcagcctctcaaagggctaggattacaggcgtcagacaccacgcccagctattctgcaaattaaatgagatatttctgtgcaattcttagcataacacctgcctggcacaccataagaacacaagaaaagctgtcgttattattattactacctagctaagtactaggcacataataggtgctaactttaacttaaaaataatagtttattactacatcaacacttgatagtcttatttcaataacaaatgtttcttgactacaacaacattcactgatcatttcttgtggcttaaaactctcccaaacttaccaatattagtggcaccagcatccagactgttttctaccatcttcttcaccgcagtgcttagactcagtactaccggcccagagcaaatctgatggactgacttccgatcaataggtttgatggccttagcaggttctgtactaaagaaatcagttacaagaaacaaagcaagtattcagctatatattttcatcctgattttaactgtgggaaatgactcaacactgcaaatagtttatgggtctaatctattcatttattatattaacaaatacatttattatatccagaaatggaaacattgttttacaatccttaaacaagtacccaaaatacttctggatagacacttcaaattcaacacatccttactatctagtatccacatggagaaaacatacattgtatctctcaaattaccaaaatctttggcaataatggtgtcttctttcttgaaaactgaaagcatggccggtgcggtggctcatgcctgtaatcccagcaatttgggacacagaggcaggcggatcacttgagatcaggagtttgagaccagcctggccaacgtcgtgaaaccctgtctctaccaaaaatacaaaaaattagccaggcatggtggtgggcgcctgtaatcccagctacttgggaggctgaggcagaagaatcacttaaacctgggaggcggaggttgcagtgagctgagattgcagcattgcacgctaggctgggcaatgagcaaaaaaaaaagtaaaagcaacataatttcccacataattagaaaaaccaacagtatgctgggaaatacacaatgtttaagtcaaaatcatctcagaaattggataccagttatataactattccttatacacagttgcctttgataccctactccaaattgaagctgccagctactgtcttagcaaagaccctcaaagttcttgctgtacttgttttaagagtttttttttgtttgtttgttttttttgagacggattcttgctctgtcgccctgtcgcccaggctggagtgcagtggcacgatcttagctcactgcaagctctgcctcccgggttcacaccattctcctgcctcagcctcctgagtggctgggactacaggcgcccacgaccatgcccagctaattttttgtattttttgtagagacagggtttcaccgttttagccaggatggtctcgatctcctgacttcgtgatccgcccgcctcagcctcccaaagtgctgggattacaggcgtgagccaccacgcccagcccactttaagagttttataacggtttcatttccccttattccctgctccaacccatcctccactctatcaccagagctatttttgaaatcacgaatctggtcaaataatttttctgcttgaaaaattactagtgccccacttcctactatatgaaacttaaaatctagtcatcactgggccccaaactaccttcttttcagaatctctccgatcctttcccttcatcaagtcccctacattattattattattattattattattattattattattatttgagacagagtctcaccctgtcacctgggctagagtgcaatggcatgatctcggctcactgcaacctccacctcccaagttcaagtgattctcctgtctcagcctcccaagttgctgggattataggcatccaccattacactcagctaatttttgtgtttttagtagagatggggtttcaccatgttggccaggctggtttctaactcctgacctcaggtgatctgcccgccttggccttccaaagcactaggattacaggtgtgagccaccgcaactggccgtcccctatattgcagcacagtgaacaactgtttcctgaacatcacaagctctcttagacactacagtgtataagcaggtctctgtctaaactgctctcctcttgcccctctgcccaaccaatgtctgctcatccaaagaatgtatcccgtgtgttcattaacttagcaagttcccagtaaacagtttaattgatcactcgttaagagaaggcgggaaacctccatgaaaagagaaatcagtgggtatttcctacagcatttaacacatcgtaggccttcaataaacccttgtgaaataaacaaacctctttactcttcattctatgttgctaagaatctcacctaagtctgtctaccatgtgaaactgcagatgacctcacagaaaatggaaagaagtatctctaaaaataagtttatttggcaacacactacaggctacaggttcacttctgattttttttctttttttttttgagatggagtcttgctgtgtcacccaggctagactgcagtggtgcaatctcagctcactgcaacctctgtctcctgggttccagcgattctcctgcctcagcctcccaagtagctaggattacaggcgcctgccaccacgcccagctaatttttgtatttttagtagaaatgggatttcaccatgttggccaggctggtcgtgaactcctgacctcatgatccacttgccttggcctcccaaagtgatgggattataggtgtgagccaccgcacctggtccacttcagatatttagatacagacggcaaatttatttaaatgtctcaatacatttaaatgtagttacctaaatatatctaatatatttaaatgcagagagcaaatttgcgtttacaaatctgacatggaattcaactgtgctagccaagattcggtgtagcttaccagccagaaatcacataccctaacaggtaaaaatgcattgcattttttaaaactgagcagctacgcaaattaggatatgtctggatgctctactgtccccaaaataacctcaatttttttttaaaaggccaggcacagtgcattacgcctgtaattccagcgctttggggggccaaggcgggcggactgcttgagctccggagttccagaccagcttgggcaacatagcgaaatccccgtctctacaaaaaaataaaataaaaattaaaaataaaataatataaaaataaaaataaaaggggagggagaacaggtagaaaggaaatgcattcagtctatggggatttcacgttccggcttcaagtccacggccctgtgatgggatgtgggcagggcctgagacaggccgaacccaactcttcacagggccgaattctttgcccgcagcccagcaccccgaaggagcttgcctcggcttcaaggcgcacctaatgggcaccggatcgctggggcgctgaggatgccgctccggggcctccacgaggtgacctcgccacgcgcctcggccatgttccccccatttccagggaggttggaagccgtggttctcaaagagggcgcgcgagaggggcgaccgcgagcccagctcacctccagctctcagctctctccaaggatgcaacaccggatccgcctcggggactgggaaagtgccctccacggttcccacaggcgccccgcctcctg

SEQ ID NO: 265 - DNA, 11617 bp, Homo sapiens
gttttcctaaacaaatcctttcacagggaccgacggcacttgataatgtgacaaaaaccagcctcttccaccccactgcagtgacttttgccggaaagtggagcagtgggcacggccaaccttgtcgttcatcaatgccgcccctggcagtatctgaggatcggtggcagccatgcctccccctgccccagccgctccttcccccccacgctaatctgcatggtgtgggcgcccttgggacccccgaggactgattgtctgaccttgcttcacacgcccagtaaggactcccccaagatgtcgctcgagtggctggtggcctggagctggtcgctggatggcctgagggactgcatcgccaccggcatccagtccgtgcgggactgcgacaccaccgctgtcatcactgtggcctgcctcctggtcctcttcgtgtggtactgttatcacgtgggcagggagcagccccggccctacgtctccgtcaactccctcatgcaggctgccgatgccaacgggctgcagaatggctacgtgtactgccagtcccctgagtgcgtgcgctgcacccacaacgagggcctcaaccagaagctgtaccacaacctgcaggagtacgccaagcgctactcctggtccggcatgggccgcatccacaagggcatccgcgagcagggccggtacctcaacagccggccctccatccagaagcccgaggtcttcttcctgcccgacctgcccaccacgccctatttctcccgggacgcacagaaacatgatgtggaagtgctggaacggaacttccagaccatcctgtgtgagtttgagaccctctacaaagctttctcaaactgcagcctcccgcaaggatggaaaatgaacagcacccccagcggggagtggttcaccttttacttggtcaatcagggggtttgtgttcccaggaactgtaggaagtgcccacggacgtaccgcttgctcggaagccttcggacctgtattgggaacaatgtttttgggaacgcgtgcatctctgtgctgagccctgggactgtgataacggagcactatggacccaccaacatccgcatccgatgccatttaggtatgttgcaaggacaggggtctcccggcatgcacatttgcaagctcagcccctctccatcaaaacatcgcgaaagctcaaatggtcagaattgcgccttttcgcattgttcacttttagcaaaaactgatgaattgcatgtaaacaatttgacagcagagattgagtcaaaaagaaatcttgtgatcagtgcaaacctaatttctgacagcagctctgtgcaaagaactttctgcagtgacagaaatgttctccatcttcattgtccaaaatggtagccactagacacatgtgactaattgagtgcttgaaacttgtctcctgtaactgaggaactaaattttaatttaatttaaatagcagtgacacatacggctagtggctaccgtatggggacagtgtcgttctagagccaaagacttgttaaaatgattaccgagcttcataatgatgtccaggaggctgtgaaagatacttaagcatctttgcagtcatcaaggatgaaatgatccttggtgataagcttgttttactccgattctgagaaaattggtcgtatgcgtactgtgtgtgcggctgtggttttgcaaacaaagactggagttagacagcctttgtttgcatcttggccccaccacgagctgtgctactgtaggcaagtcatttcacctctctgagcctcaatttcactatttgggaagtggaggtaaaaagatcttctcctaaagagttattctgaggatccaatcagataatgtgtattgtatgtatgcacacagagcctaaaatagagcaagtattcaataaaagtaggcttaaaacaacttaatcatggaggtattagttccccagaatgccttattcctggtgagtggcgataaaaagctcgtctctgggatggtggcatcaccggttagtatctcagattagagtgtgcagagacagccttggcagcgtccagctttacaaagttcacaacgctgcttcagcttcagtagggaggaaggaagagcagcaggaggaacctggtgcatgggttggagtgggagtttcataaccacgttctgcagaggagcctcagggctgcctgggaaggagccggagctgggggcccccgagccctcttcaccctcagcagctctgcttctcctgctgtctgtgtgggggttctgagtaagatgtggtttggatggaggatatcactgcactaaaagaaaagaaaagaaaagaaaagaaaagaaaagaaaagaaaagaaaagaaaaatataatgagatttgagcaattgacatggtaggaatttcaagagtaaagggcggactgggtggaggctttgggggaggtggcctgaattcctggtcagcagtcagccgtgagactttgagcaggtcactgagtctctctctgcctcagttcttcatctgtaaaatggggagatggtacttacttcacaggattgttgagaggattcaatgagtggcatcttacatggccccttggcaggattcctggcacgtgacagcatttgatgaatgggagctagtagctattatcaaggactgtgttggaccatgtgaaaaatgatccataagacatagaccctgcccccaggaaacagtgggaaaggaacaggcttcggaagcaaacagatctggactcaggtcctggcctcgccccatttgctgagtgaccttgggcagggctctgaacctccttaagcctccgttttatcttctctaaaacagagatgacgattcccacttgctggctgttttgaggagtgggaagtaatatgtgtaaaatgcttggcaggtagagggcagtggacagtaagctaatctaagtgatgggatgataatccaggtgatggtcattagcaaaactgctgtgcgaggccccaagcctcacttggctgcagacggggtgccctggggaggtgggtctgacactggaggatccccacacagaaatcaggtgccgccagggtggagcgagggagcggaatcatcccctggggcttggggaagccgggtctaggcttgctggggaggccagtagtgtgggctgaggttggacaggtcaggtgggagcaaacctcagaggcccttgatgccaggcttgagaatggaggccgtgggcaatggggagtgatgctcttcttttgaaaggtttgcctttatgtattgttttaaaacttcagaatgacatctggggaagggcatttgaggactgatgtggtagaatttcaaagaggtgtgagtaggaagtgatggtagcaaggaaaatctggggtttgctttctgtagattaacacttgttgttcatctgtatgatatgcatgcatgtgtgtgtgtgtgtgtgtgtgtgtaaaacatgcccacgctggctcacactgtggcctgtggcctgtcattcctttctcagcccagctaggtacttgccagaaaaagtaggccctccatgttcctgtagatagcaggaaaccttcttggaagacgtcccactgtggcgtggcttgttctccacggccaaggcgagctccctggttgggttttctcagcgtttccttctttacactatcatgcccacattaatatccacccaggaaggaaacaaaggtgtgtcggatttatgtgaccttgtgtgttgacagagagggagtccagagaatgaggtcagaagcaggataagcctggtgcgtacctggtggccacacctctgctggttacctggctgaaggtagaggcacctgcagttccagaaccgtgctcttgaaatgccaatgcttgcttttcttctgccttctgcctgagctgtgactgatggaattgtccctgtggaccactgaagacccagccactgctcctcactaacacagcccatttgttcgagacatatttgctgagccctgctgtgagctacttctagaggtggcatcacctagtcccgacttcatatgggaccacaggacagcttcaggcccaccccccactcagcatcgtacacaatgctgggatattccagatgcactgccacaaacttccagaaaaccacctctgaaactcaccaggcagatgttaccagggaggcagatacttcatgaaaatgcatgaatatgttcagcaaattctagctaaagaagcacagttagactcttgtttttcttttctgcatgtcatcagatttctaggtggtctagccgggtggtaacagtagatcagctcatgttccccttgcccaccctgagtgcccggttgccagccgcctgaagtgggggccactggtggacacagccctttctctaccctccttcctgcctctttcagggctcggtagggacagagcagcaaagcttgagccatagaggagcatatgggactatctgaggccatgtgtgggacctgtcactgtcctcaagagccactggaatgatctgtttagggaagaattgagctcttctgccaactaagctggtttgtgggcaacaggcaggaatgggggcaggagcagaatgaaggggaggcggagaacaagaagcaggggggtgtcaagccagcaggccaggccatttttctatcgcaccgtggcacgtggcgatgaatcatttagtggcccagagaaaggggagcttctttctgaaaccccggggtggctgtccctgcagagaactgcccattcctaaaggccttcgccacctgaaccagccagtaggggcacacgccaaaggaaaacgtagcctctgagtccctccatctgggcgtctttacagccctgactcccccagctgctgttaaccatagtgggaaatcatggcttctgtcaggatgagcagtctcagctgatttaatgaaatgtactattgagagttgaaacatattagggtcctcttagagggacagaactaataggatatatatatacacacagatatatacacacatacatatatatacatatatatacacacacacatatatatacatatatatagatacacacatacatatatatacatacatatatatacatacatatatacacatacatatatacacatacatatatacacatacatatatatacatacatatatatacacacatatatacatatatatatacacacatatatatacatatatatatacacatacatatatatatatacacatacatacatacacacacacacacacatatatatataaaggggagtttattaagtattaacccacatgatcacaaggtcccacaataggctgtctgcaaactgaggagcaaggaaagccagtcagtttccaaagctgaagaacctggagtccgatgtttgagggcaggaagcttcgagcactggagaaagatacaggctgggaggctaggccagtctcacttttttatgtttttctgcctgctttatatttgctggaagctgattagattgtgcctgccagattaagggtggatctgccttccccagcccactgactcagatgttaatctcttttggcaacacccacatagacacacccaggattaatactttgtatccctcaatctaatcaagttgaaactcagtattaactatcagacatgttaactacaagaaaatcagcaatcaggccaggcacagtggctcaagcctgtaatcccagcactttgggaggccgagtcaggtggatctcttgaggctagaagttcgagaccagcctggccaacatggtgaagccccatctctactaaaaatacaaaaattagctgggcacggtagtgcacacttgtaatcccagctactcgggaggctgaggcaggagaattgcttgaacccaagaggcagaggctgcagtgagctgagatcatggcactgcactccagcctgggcgacagagcacgattctgtctcaaaaaaaataataataaataaagaaaaatcgaaaactccacaatcactttaattcctctgttaatagtataacaactagcatttatatcatcatgtccagttttataacagcctgttctttggagtcaggctgactcagcaacactaaatggtaactttttagcaggtcatttaacttcttagttaccccatctggaaagtgggtgaagtgatacctgttaagtgtgtatttagcacaaagctgagtaggaagacacagtaggtcttcagttattggtaacaaggatagaagtcccatagcagccctggaaggttcagtatgctaatgtcccctctttacaggtgagggtatggctcagagaggctgagtgacttgcccaaagtcacacagcacataagagtcacaaccagtcgtctgtccccaagtcctccgtccttctgtctcctccatgtggcctctttatttgaattattactgtgaacgtacttcctggaaccattatttctggttcaaagaatacattaaaatactctggctgctggaaggaaagctatttcatttttatgctaaaggacattaaatcagaggggaatgccaactggcccagggtcattgtggtcacagtgagtcactgaagacagatgagaccaccacccatcccagctcctcttccaggactctgcttccccctgggtgggccttcctgagagctgttgggctgacccaaccccttctgaaatcattagatggccacggtggccccttcttttctggacatcaaggtagtgatgggggccaagtgtttctgcagacccttgtgttggaaagggcgactgagggtcacacatggcagtgttccaaccggaccccactggccggttgaagcatacggcttattttttattttttatttttatttttgagacagagtctcactctgttgcccaggctggagtgcagtggtgcgattcgcccaggctggagtgcggtgatgcaatctcggctcactgcaaccttcgcctcctgggttcaagcaattctcatgcctcagcctcccgagtagctgggattacaggcgtctgccaccatgcctggctcattttggataattagtagagagagggtttcaccatgtttgagaccaggctggtctcgaactcttggcctcacgcgatctgcccacccctcagcctcccaaagtgctgggattacaggtgtgagccactgtgcccagccaagcatacggcttcttacaaagctgccagtctatttcctcttgaacctaagccattaccttagaagtgtcctccagtttcccagaatgagggcagacgaagagcacgccattctccagcctcaaaacggattaaaaggctagaacccaaggaggagaacactgtgtgagcctttgattttttaatcgcaactgagatagtcctagaggggagactacagtaaacacagttactgggtaaggcaaggttctaaacccaacctccctggatttctgggggtcccctggttaggcttcagagtgtagtgcaaatgtcagtctgtgactttcataaaaggaatccatgacccagaatagatgaagccaatgaaggaatgaatttttgccaagagtgcagtgaagatctagatggtggcttataaacaacaaaaatgtagaactcacagttctgaggctggaagcccaagatcaaggtgccagcagatttggcgtctggtgaaggcctgcttcttgttcataaatgacaccttctcactgtgacttcacatggtgaaaggaggtggccaggagcagtggctcttgcctgtaatcccaacactttgggaggccaaggtgggaggatagcttgaggccaggagttcgagaccagcccggtcaacatagcaagaccccatctttacaaaaaaaagtttaaattagctgggcatgatggtgcacacctatagtctcagctactcaagagggtgaggctggagcatctctagagcctaggaggtgaaggctgcagtgaactatggtggagccactgcatttcagcctgggcaacagaacaagaccttgtatctaaaaaaaaaaaaaaaaaaaaaagatgtcaggccaggtgctgtggctcatgcctgtaatcccagcactttgggaggctgaggcaagcaaatctcttgaggtcaggagttcgagatcagcttggccaacatggtggaaccccatttctattaaaaatacaaaaattcggccaggtgcagtggctcacgcctgtaatcccagcactttgggaggctgaggcgggtggacacgaggtcaggagttcaagacccgcctggccaagatggtgaaaccccatctctactaaaaatacaaaaattagcctggcacagtggcaggtgcctgtaatcccagctactcgggaggctgaggcaggagaatcgcttgaacccaggtggcagaggttccagtgagccaggatcgcgccactgcactccagcctgggcgacagagtgagactctgtctcaaacaaaacaaacaaaaaaattagccgggtgaggtggtgggtgcctgtaagctactccagtgcctcccagctactccggaggctgaggtaggagtatcatttgaacctgggaggtggaggttgcggtgagccgagatcacaccactgcattccagcctgggcaacagagagagactccatttcaaaaaaaaaaaaaaaaaaagggaaaagaaaaaaagatgcaaaaggaggtaaagaagctcccttgggcctgttttataaggatgctgctcccattaggaccccaccttcatgatctgatcactttccaaaggccccacctcctaacaccatcaccttggggtcaggtttcaacatgggaatttgcagggacacaagcccacaagccttcagaccatagcacgggctccagaggtgtgaggcaggtcaggtgctttagaagtcaaaaactctcagtaaggcaaatcaccccctatctcctggccttccctgaatcttgcctgccttcactctcctttctctggttttcctacaaggtctgaaaactccaaatggctgtgagctggtggtggggggagagccccagtgctgggcagaagggcgctgccttctctttgatgactctttcctgcatgctgcgttccatgaaggtgagtggctgcctttcccacttcctttttttcaatgaatagacttttatttttttagagaagttttaggtttccagaaaaatcaggcagaaagtaccaaggaggccccttcatatcaccccataacacatatacacacacagtattgatgcgttattattacctaaagttcatggttgacattaaggttcactcttggtgttgtccatccattctgtgggtttcgccaaatggataatgacacggacctaccatgacagtatcatacagaatagtttcactgccgtaaaaattcccacttaaagatccctccatctccccatttccttttgtccaccctgctcagaagcccatgaagccaggtttatgctctcagtgagagaggaggtggtccgatccgagccgagggacaggatggggtccctgccccgaagctgagcacgtagggtccagccctgcctggatcctgggtcctgactccagggtggtttgaacctgtcctctcacccctccttcccccccaggttcagcagaggatggcccacgggtggttttcatggtggatttgtggcatccaaacgtcgcagcggccgaacggcaggctcttgatttcatctttgctccgggacgatgagagtatttcccatgctggagtcggcgagaagggccgaggcggggcctgggcagactgtggtccggtccagtccctaccggtgttgtttccatgctcagaaacctgcctcagcggaaagctcttatttgggattttatatcatgtcgggtccctctttcccttggttattgtaaatggaaacttttcggcttgtatttccttagattttttttttttccttccaatcatttgcttcagagactcctttctggcctaacagcgcattcctttgattggtccttgagtgaccagagacttagtgcccttgtaagtctgtcttctgttgctacttgtttttttcagtgctctgaaatagagtaactaaatggttatttgtctgaatataataatgtaaaacttcttgtggtcatcttaaaaaaaaaaaaaaaaaactaaaaactgcaaaccagagagctagagaacttggcctctgatgctggcacactggggacccttcagccacctgacggcagggggacagtctgcagcccccacacctgactggcttcagtagccaggtggaggggctgccagacacagtcagggtggcacacagtgtccaggcccagggatactgtcaccatcgctcacctcattctaaaccttgtcaggtccctgatggcaaaagcattgggccagtaggactggaggctactctttaaacatggctttcctgcaaagctgaagctggtgtcccccagcaccaagctgcggctcacacagatcagccacggaacgtgtgatccgcttacctcactgcctacagaagccctactgccaaactgggcctggaaaattcccagttttaggtgttttgagtccacagtgatgaacgttaaggccaccaggttggctgataggagctgtagggggataggaccgcgctcacccagcgacatttggggaaagcctttctctggcaaaactggaataatagatctgaccaaagtttctgttttgctttggagttctgttgcctatgtttttttttttttcatttatttgtctgtacataaatgttcaaacactagacttggagatagtggaagagttggccctgtgtctttgtcatggcacaaaggtgtgcactgcgtgacaatgacccaagccagtgtgtgctagtgaggagacagagaagacctacatgcccagaggacccgtggccgttgtgctggttttctggtctcctgtgaagaacatgtggatctcttcccgaaggaaaaggtcccaggagaccagtttgaggcactcactctagaaatagcctgtgttagctgatgtgtgaaagcgtagccggccagccacactagagatgccttttctgaataatgtattatgagcagtgtcagatttataaagccgaggagtggtttggaatatacagctggtcgcaggtgcaggtccagtgtttagatccaaatggaaaacagcagcttctaagaggtacaactgttggaagaaaacacagttgaaatgcaccaggcaggtactagcaagtgtgcaaagagcacgtctacatttgagtaaaatgtctacacagatatttgtcagtgatgagaatgcaggaaaaggcagacatttcaaacatacctgaagtctttttactcattatcttgttaaagaatcactgaggtgcatgatttctacacatcgtgactgctctgctctgcgtttacaaaaccaacagcccgcgcaggtacctagctacctgcattcatgtgacatgtctggggaacagaagataaataaaggatcttgctgaaaacca

SEQ ID NO: 266 - DNA, 576 bp, Homo sapiens
gaacaaggaccctggcttcagaaaagctgaggatttaggactccgtgccaggagtttgcaccctcgggaccttgggcaagtcccttagcctctcatagcctcagtttctcctctgtgggtatgtgcagtatctggcacatgaagggcactcaacaaccttgtttccctttctgccacagctgagtagagaaacaggtgaagaggaaggccgccaaatggaagagatgggaaaacacatcgggacagcagtgggtgtggccagagaagccagtggctactttcaattgcctgtgtctaatcacagaggaagaaacatgtccctcagtagctgtgtttttcatgtttttccctttagaagagagggagacaggggggtctcccagccaggagccctagaagcagccgggctgccgcatgtttccacctgcaagcgaggttccagccagctgtccgggctgggctgccacaacaagcggaagggaagagcgccactcacctgggatcgcgatgtttctcaccctcctcaagtgtgcattgccagctaggcattgctaagctaatttacgtgttgtagct

SEQ ID NO: 267 - DNA, 566 bp, Homo sapiens
cgtgcttctgcacttcagcctgggtgacagagtgagactccatcagagagagagagagagagagaagcaagcgctcagtgctgagcttacctgggccaggtagagggatgtggccacgggcaggaagtggctgtgggaatctggcgctacaggttcctctgccaccccacttcctccacacctgacctcctgtccccacctgtgccccgtcccttgctcccacctcctcgtgacctctgatgggggaggcttctgcagccccccaccccagtcccaggcaggggtgcaggcccccagaacacccagttgggatcactgcttccctctcactgccatctttgtgcctccctggggtcccccatctctgaggctcctcatctctggttttgggtgtctctctgctctcctcaccttggttttctggacagtatgtgtcagggccccaagggggtgtcccaggtgaggacagagaaggaagtggcagaggcaggaccttccctttgcacctcagctcatccatccactccccctctgcagagtggggagggggaggaggggggtcttcg

SEQ ID NO: 268 - DNA, 6202 bp, Homo sapiens
aggcatcaacatttatgagccagcaccccctactggtcccacccagcgacccctggaaactctgggtaagtgcttggagggccaggttgctgagggtggggagggtcctccagcgttggggtgtcctaaccctttgctccccaacctgcaggcaatttccgtggctggtacattagaactgaaaagctccagcagaaccaaaggtgagtcgccagggccagtgtggcttacactccattccctgctccacccttcctcactgtgagacctggagaaactgacttggcctctctggacctccatttcctgctctgtaaacagggttagcataagagagaatgcttgtaaaacacacagcatagggcccggccaggtctggctagcaccagtcaatagcagctattattggtttttggtttttgtttttaagatgaagtctcactctgttgcccagactggagtgcagtgacgcaatctcagctcactgcaacctctgcctcccaggttcatgcaattctcctgcctcagcctcctgagtagctaggattataggtgtgcgccatcatgcccagctcattttgtatttttagtagagacggagtttcaccatgttggccaggctggtctcgaactcctcacctcaagtgatctgcctgcctcagcctcccaaagtgctcagattacaggcatgagccaccgcgcctggctattcttgttattgttgtaattattctaaggctctttccctgggaggggaagagtcaccccaggcccctgtcctccatgaaacagagccttgctcctgcacagtagatgagctggtgtgacttggaggctcagggtcacacaggccagggttgggatcctggctctgccacatgtttgctgcttgaccttggacacgtctccatcctcagcctcaggttccttgtctgtagcatggggttcaggatgcattgccctcagaggggcccgtgggaactgagagtggaaggtgctgagggagcaccccacgtgtggggacccaagctatccctaagaaagcactaagacagggcttcctgctccctggatcctggcagatcgcagaccccgcctctcccggcccttctttcacagctggacagtgaagcagcagtgtgtggaccttctggccgagggcctgtgggaggagctgctggatgacgaacaaccagccattacggtcatggactggtgcgtgcccctcccctgccagcctgaccccgtgatcgcgcagggctgcccagagcatgagccttactctgagctccccttgctttcagcccttcaccaagaccctcctggtgctacagggtcctgccctgcccacctccctggccccttctgtttgagcctttcagattttgaaatgtgccagggggttactgaggctgatctttatttctttttcttttcttttttttttcttttttctttcttttttttttttttttttttttttgagacagctgactctgtcgcccatgctggactgcagtggtgccatctcagctcactgctacctctgcctcgcaggttcaagcgattctcctgcctcagcttcccaagtaactgggactacaggcgcgcgccaccatacctggctaatttctgtatttttagtagcgatggggtttcaccatgttgcccaggctggtctcgaactcctgacatcaagtgatctgcctgccttggcctcccaaagtgctgggattacaggtgtgagccactgtgcccagcctattccttatttcttaaaagcctgtcaccctctattctcaagaccaattccttcttattccttaggagtcacttccacatggctgcaccaggaagccctccctgatcacccctcagctgggtcacgtgcattttctccagtgccctgtgcctccaattccagccccaacccctctgcctgggtccccaattccgaccccaacccctctgcctgtgtccccagttctgtccccaactcctctgcctgggtccccccatcctggccctgacccctctgcccgtgctccccatcccaaacctggccgttcctggctgtcatgtttggtggcatgcctgcctccctcactggactgtgaatcccatgtggcagggtgtggggctgtcttggtcactgctatgttgccagcaccacccagctcagggctgtgtacagcatgggtagcagcatgtgtgttgaatggggaatggggccaggggctggggctgggtagctgagactgcagtgacagctgaaggccttgactccgcctgcaggttcgaggacagccggctggatgcgtgcgtctatgagctgcatgtctggctgctggcggccgaccgccgcacggtcattgctcagcaccacgtggccccccgaacttctgggagaggaccccctggccgctgggtccaggtgagactctccgcgccggggccctcaaccccagacgtgtgttcttgtcccaagacctcacagagggaggagaacaggtccgcgggtcctcaaaaagggctcctccctaaccccaggtgctgtcaccacaggtgtcccacgtattccgccattatggtcccggtgtgcgctttatccacttcctgcacaaggccaagaaccgcatggagcctggtgggctgcggcggacacgggtgaccgactcctccgtgtctgtgcagctccgggagtgactggctggctcctctgtcctgaccccacagcacctccctgacctttaggagccccaactcttagtcacctcctaggcctcttatttctccctggcccttggcttctcacttgatggacagcttcacacacccttaagcggtggactccagcattttcccagcactgtctgagccccatgagggcggagccactccttgtaaattcagtgcccgacagatgctctggcacagatgctttgtagatctctgttgagagaatgcatagacacctgtgcccaaggatgctgagggctggtctctgcttctttgaacttcactgaaactgaatgctcactgctgtgttgccagcaccacccagcccagggctgtgaacggagtgggtggcagcaaatgtgtgttgaaaggggaatgaagccattcacttcactcagttcctgtcccatttaaccgccccgatccttgatcttccattaccttcacatcccggggtccttctgaactgaccttgacctctgatctcttcacacatctccccttagcatctccacttacctacttttttttttttttttgagatggcatctcactctgtcacccaggctggagtgtagtgacacgatctcgactcactgcaatttccacctctcaggttcaagtggttctcctgcctcagcctctcaagtagctgggattacaggtgcacagcacctcccccgactaatttttatatttttagtagagacgggatttcgccatgttggccaggctggtctcaaactcctgacctcaagtgatctgcccaccttggcttcccaaagtgctgggattgcagacgtgagtcactgcgcccagccattccatgtctcttaagtctcagaatctcccctagctccctccaggtgtctgcagtggttgtcccctcaaagctgtcccacaccctcctccgaggaccctttgtgtatctcctccagctaccgcagagcccacaaacccaggcatctatcaaagtccctcattcatgagggtggtgaggacacagactgcgaccagaacagaaatatgaaaatgtgaatgacagcgtcccccgtgtgtggaatgtggggattaaaagcatttatcaacctctaagtcctgatctgatcacttgcagatcctagccctagtgcagggctgggtactagaaggccccctgctgtcccctgcaggaaccatggagggagtccggaggcccctggaggccagaaacggctcaaggaagagtgtttgtttgtttgttttgagacagagtgctccctctgttgcccaggctggagtgcagtggcacgatctcggctcactgcaacctccacctcccaggttcaagcgatttctggctaatgtttgtggggtttttttgtttgtttgtttgtttgttttgttttgagatgaagtctcgctctgtcacatgatctcggctcactgccagctccgcctccaggttcaagccattctcccgcctcagcctcccgagtagctgggactacaggcgcccaccaccacgcctggctaatttttttgtatttttagtagatacggggtttcactgtgttacccaggatggtctcaatctcctgacctcgtgatccgcctgcctcggcctcccaaagtgctgggattacaggcgtgagccaccgcaccccgccctaatgtttgtatttttagtagagacggggtttcaccatgtttgccaggctggccttgaactcctgacctcaggtgatccgcccacctcagcctcccaaagtgctaggattacaggcctgagccaccacaccagggctaaggaagggctattactgaaaaggatggggcatgtttcatatttaacaatcagcccaaggttcccctgcagttcactcacatgtccttctgtgggcgtgtgtcttcgtgcacacctaaaaccatgtccgagtcgatggcgtgtccttatccatggcattgtcctgggtatgggctgacccaggcccaaccaccctgctgtctcctccatcccacccggtccttgcatcccagggacaagcagatgacagacggggacaactgcacaaaggctgtattgcaggggaggtgggagggggcaggcagaacgctcctcctcctgggtcttggggccccggagcagagcccagggatgggctgagtgaggggcttggcactctgtggaagctgcagatgagagaccagcaatgcatcagctgcacctgaaatgtaatcaagaattccttccaggggctctcagagacccagagtctggtgagttctagaagcctgagactgggtgggggctggggagtctgggtctgaggctccaagttcaggaaccagggatcctagcctgggagtttggagctgggggctccttggagctcttgggggacaggagtggctggggagggtttgggagggtgtcaccgctggatctaggtcccaggtctgtgagtgcaaggtggcctcagggacctccagggttgggtcttgggggtgggctgtgggactgattttagggctgaggctggtctggagggtctaggggagtggagagcatgaaggctacactgggtgttcctataatcgagtctggagtcttgaggtctgggttagttttggagtctgggagctttgagatgtgatgatctggggagtgggggctggctttggttctggggactccagggtgagggggtctaggagctctcagtccccagaattagccagccctctctgggaagtacagctgtgggcgggtgggtaggcggaagattccagaaggtggagggttggctctgaatctcagagctggggcggaaatctccgtcccaggggcctgggctgcaggtggagtggggaccgggtgctgggggtgaggagaaggaggacctggtttgggtgaggactctgagatgggggcctccaggactggttctagggaggcctggtgctccctgttacagtcgggagctcaggggtgtggagcagcctcggggcttgggtggtgggtgtgggggcttatgcggagctggggcctgggcctggggtgggctcggagctttgggcggccgggcacctgcagtagagcgcggagatagcgttggaccagtctcctaagatgccccggcggtactcctccaggcgcgggtaggtgccggcagagaacttgtgcgtcttgcccgccttgccttgccgggaccacacggtgagctcgcagcgcggggccaccacaagtgaggaggcggtgttggcccagttggagggcaggtagggcaggtctgcgcccgactccagcgacagctcggcgcccccgcagcagttctcatagtaggggtcgctcttgtcatagagcttggcgcaagtgcgcgtcccgtccgagtgcttgaggtcggcggaggcggggcaggcgccctgggcgcaaggcacggaggcaagggccagggccagcagcagcgggcgcagcggggac

SEQ ID NO: 269 - DNA, 839 bp, Homo sapiens
  SITE (678): n equals a,t,g, or c
  SITE (783): n equals a,t,g, or c
  SITE (785): n equals a,t,g, or c
attaacaacaaaaaccgttttggagaagccccatggctcaccgcccacgctggacattgtcgcaagtcacagaattatttgaaaaaccgttgctggatctgctgtttgaagcgcagcaggtgcatcgccagcatttcgatcctcgtcaggtgcaggtcagcacgttgctgtcgattaagaccggagcttgtccggaagattgcaaatactgcccgcaaagctcgcgctacaaaaccgggctggaagccgagcggttgatggaagttgaacaggtgctggagtcggcgcgcaaagcgaaagcggcaggatcgacgcgcttctgtatgggcgcggcgtggaagaatccccacgaacgcgatatgccgtacctggaacaaatggtgcagggggtaaaagcgatggggctggaggcgtgtatgacgctgggcacgttgagtgaatctcaggcgcagcgcctcgcgaacgccgggctggattactacaaccacaacctggacacctcgccggagttttacggcaatatcatcaccacacgcacttatcaggaacgcctcgatacgctggaaaaagtgcgcgatgccgggatcaaagtctgttctggcggcattgtgggcttaggcgaaacggtaaaagatcgcgcccgattattgctgcatctggcaaacctgccgacgccgnccggaaagcgtgccaatcaacatgctgggtgaaagtgaaaagcacccccgcttgccgatgacgatgatgtcgatggccttcgatcttattcccaccttggcggtngnccggataatgatgccaaccctctttagggaccccctccgccggacccgaccaaa

SEQ ID NO: 270 - DNA, 365 bp, Homo sapiens
aagaccggagcttgtccggaagattgcaaatactgcccgcaaagctcgcgctacaaaaccgggctggaagccgagcggttgatggaagttgaacaggtgctggagtcggcgcgcaaagcgaaagcggcaggatcgacgcgcttctgtatgggcgcggcgtggaagaatccccacgaacgcgatatgccgtacctggaacaaatggtgcagggggtaaaagcgatggggctggaggcgtgtatgacgctgggcacgttgagtgaatctcaggcgcagcgcctcgcgaacgccgggctggattactacaaccacaacctggacacctcgccggagttttacggcaatatcatcaccacacgcactta

SEQ ID NO: 271 - DNA, 687 bp, Homo sapiens
tcccagtccccttggtctctgtgacagtgggcggggccggccctcccaggatctgacggcgcaggtcctccccttctgtgtcctgcagatggacacccgctccgggagccagtgttccgtcaccccagaagccatactcaataatgaaaagctggtcttgccgccccgcatctccagagtgaacggctggtcgttacccctgcactacttccaggtggtgacctgggctgtcttcgtgggcctttcctcggccaccttcgggatcttcattcccttcctgcctcacgcgtggaaatacattgcctacgtggtatccttttcatcgtggcatggtctaagcgggaggggttcctggaggaacttgcgatggacctggctgtggggtctgggccatggctgcccggtggcaccagtcacctgccctgggccagactatgtcccctgagcctgcaggtgggcccagtggccactcatgctctgtgcagcccctgcttagggtcaggacaggacagcgttggctgagggggctccggagagggaatctgtcaggagggacagcagccccctggcgtggcgcaggacccgccctgctggcagccttccgctaaaatccctgcgcagcattttgcacatggccagcacctttctccttgcccctggtgccaaggaggaacagcgccatgcccc

SEQ ID NO: 272 - DNA, 225 bp, Homo sapiens
gtggcgaagcttcctaaccctcctctgtagagaccgcccagcccctcaagatcaaccccccaccccgtagcggccgttgagtgtctttcactgccgctctgtgacaccacgtccctcccacccctgccgccctccccacctgactggccaggagcagccgcagcgtgttcagaacctcccagccactgtccacccgggcggagaccccagccccgcgtggctgga

SEQ ID NO: 273 - DNA, 1352 bp, Homo sapiens
tttgcctttgacagtgaaaacagatattaaagtgaaaggagaagaaaccgaagagcatcagaggggacgactgggttacttaactgttggggagcaatctgaggagttggttaccagagaaactggcgatggcgatcccgtgagcaacatctctcagacccattttaaatgccgggggatacttaatcatgctgaaaaacagcagagccctgaggttttggactacatgttgcagaaagaagagaaatatatacgtcaacaaaaagcacatacgatatcgcaacagtgcatatcatctagtctgttgttagatgatgcacaaaatcagaaccaaccgaaggctgacaaagatgagtccaccatgatcaatgaaatcaccctagcaaagctggccaaggacagcattgtggcacagactcagaagttagaagaccagaaggaggaaaggttacatcatccattaaggaaggacactgagtcatgcacaagtccttgccttcttggtgcccctcggaaagcacaagacccctcctctgctgggtgtgatcaaatacatggtgcctttgcgaagaaaggagttcttcccttaaagaagcagccccatcgaacttgtaagaaagtttcctatcaggagcaaatcattgttgggagaaaaataggtaaaatcagaagttctgcctttttaaagagttcttccaatcccatccccacaaaagcgcacagacttctcagtttgtgtactctgtctgcacctacacgattagaacctgaaacagcacctaccaagagcttggttagtcacataccaaagcagatgtctacaccgtgccatcccttgaggagcctgaattttaggaagactaccaaagaatcagccttactaaacaagctgtccatccttgcctccaaactggccccagccatgaagactcagaagctaagataccgacggtgttcctctgaacttcttccaatggctaaaagctacaagcgcctcagatataaaagactcctggacggattttcatccagcacagagcagctgaatccatatttggcagctagtggatgggataagaggcctaacagtaagcccatggcactttattctctcgaatccatcaagatgaccttcatagatttgagcaacaagatgccgtccctgctgtttggttctgaaatcttcccagtatcctttcatgtgaaatcatccagctcagattgcacgactgagtcctcaaggacttttcctgagcactgtgctccggcaaggcttgccttaggagaggccctccagtgcccgtctcaacctcccaagtggaccttttctttcttcttgtcccacggttgcc

SEQ ID NO: 274 - DNA, 184 bp, Homo sapiens
ctactaaaaatacaaaaaaaattagccgggcatagtggcgggtgcctgtagtcccagctactcgggaggctgaggcaggagaatggcatgaacccgggaggcagaacttgcagtgagccgagatcacgccacggcactccagcctgggcgacagagtgagactctgtctcaaaaaaaaaaagaa

SEQ ID NO: 275 - DNA, 149 bp, Homo sapiens
aactctgagtttggcaaagaaagtacctttggaatttcctcaaaagagtcgatgtcttgccatgatgaaagctctgtttccctaagaagcctgaaatccattgaaataatgccttctcaagaaaattcagaaactaatgttaacagtga

SEQ ID NO: 276 - DNA, 8205 bp, Homo sapiens
gcggccgctccctgccctgcagctttgggctagggacctgccgcttgcgccggttcctacgagcggcgccaagcgccccactctcccagtgtgggcagtggcaccagtctctgcagtacatgcgaacggctggtacgaggccctggccgcgtcttcgccggtgcgggttgcggaggaagtactgctcggcgtgcacgccgccacgggcctgccctggtggggcagcattctgctctccaccgtggccttacggggtgctgtcacgctgcctttggcagcctaccagcactacatcctggccaaggtgaggggcgccgagccgtgcgcgtaccctgcgctgcaacccctgcggcggaggaaggccgacattcactcagggttttcgatcgcacgatgttgccttctgcagtgcttagtgtttaatcatcgtgaccatttcattgtgaccattttagcgttaaaaaaaattgaactagcattaggtgtgttaaataagatactttgtgacacgtgtacctgtcatttcttttgtcttactggatttgtgctccaagcacaagtggttactatacttgctctcggggaacggagacaaagaaatcagtcgcagaagaaattgtgttggcgaaacctacaaaatttatgtcttaaaagttttaatagccagtatgtctgcagtgtctttcgtcccaaagtattccagctggtctttcttattaggaagaaactactagactaacagtttgcgaacttgtttcctctccagacccgactaagactgtgtctggttggtcgcagttacttgaccttttaatgctgaatccttttttctgaggaatcaggctagcagtaccttccttgcctacttcacagcgttatcagagcaagtcagataatacgggttaaagtgcttgattattcaaatgggatatttcaaaaatagtggctttcttgttttcaggttgtgagcatggggaaaaaaaaccggaaacaaaacaggaacggaatcagcagcaacattaaggcagtgagccattttacaggaagaatgagcacagggcaggaataaatgctatttttacttttgatttgtggctatcacagtgtattaaaggttcttaacaaactgctgttttctccgcttacgttactaggaaatgtagagatggaacagtaaagcccagggtgcagttcttatctaatatttgtaaccctgtgaagtaggtgctgttatatattttatatgtgagggaacatgattttagaggttaagttacttgcacaggatcacatggataagtatgcattgtgaatttggttgtgactgaggacattttaagcaaattaacatcttgtgcttagaattaagatttcttgatatgatcagtaaactacatttttaaatgactcgagggaataatgtgaaagattatgagtcattatgaataaagatcctttatgtgctcataacaaaacctattttttagctaggtggaaaatttgcagccagaaataaaaactattgccaggcatcttaaccaagaagttgcagttcgtgcaaatcagttggggtggtccaaaagagatgccaggtaagctaattatatccacgtaagaccatacgcacacatacacacacacacacacacacacacacacacacacatacataaattgtgatgttaattataagtttgagtattctgtagttttggcagtaaagtatttctttttttatatatatatatatatatattttttttttttttttttttttttgagacggagttttgctcttggtgcccagtctggagtgcaatggtgtgatctcggctcatcacaacctctgcctcccaggttcaagcgattctcctccctcagcctcccaggtagctgggattaacaggtaggcaccaccatgcctggctaattttgtatttttagtagagatggggtttctccatgttggtcaggctggtctggaatcctgacctcaggtgatccaccctcctcggcctcccaaagtgctgggattacaggcgtgagccaccgtgcccagcctactcttttatattttcataagttattaatatggcatgatagtttcatatgctggactgaaagcaaagaaataaatagataaagataagaagagtatgttcctattctttagggattccagcctattgaaaaagacagacctgtaatcaaataatgatgtcagtgaactaactgttatataaagatgatgtacaaggagctagatcatcaaggaaggtcagggcagggttcacaggatgaaggcactttgccattcttttgtgatattggtcaacaaatgacacaggttatttacaatcttgaccttttggaaaagatacagcaggtaatagcctacaggaaagaggaggtagaaaacaagtgccacagtagaaacactttgatagctaagatgctgtctatcctttgtggttattctgtgcagttgtctgcctgggttcttggaaagtcccaatctaagggtgcttgattgcgcccaaggatgtctgcattcattcactgggaacttacaagccctcttgcttcaatcaactcctcaatcagtttcccaaactctaatccttactagactgcgaaaaattattctcctttttacagcaatggaaaaaggcctttgtggtatcaatctgtgttatgtgtatattattaaccatatatttttatatagttgtacatttcccaactatctttaatacgagattgtgtcctatatttagtgttaaaaagatctgacattttaaaaaatcgtggtgatagcttaatgtctttatttggtaaaaattaaaagttgacctataggtttgaaattttacttatcaaagaagtcgaaagcttcagccataggccaaaagaaccagattaatagctgcttgcctgggttatcaacgcagcctagataagacttgtggcaccttgcttaagcagtactggcaggatggttgtgcagatacagccttacagatgtttctttctaggaggaaacatctgagggcttctggcattttcttttcttttcttttcttttttgtttttttgaacaagacagaatctccctgtgttgtgcaggctgatctcaaactcctggcctcaagcaatcctcccactttggcctcccaagtagctggaattacaagtgcaagccacagtgttggccagcttcctgcattttcaatagtattgagtcttgaagggtaaaagacggtgtgtcagatggacagccaggaaagtgggctttccacacagatgatataatacagtacttccaaaggcatgcctatgcggaagtctgatttgttggatgaactaaagtcattcagaccagaatatgcaggtgtctagaggagtaacgagataaaattggaagaataggcaaatgtgaaattatggaggacctagaatgtctttgtgtactgtcttattatacactataatttgactaaattcagaaaaactattgaatgcctcctctgtacaaaatatatgatacaggagatttaaagatgaataaaatagaacactgtcccctaaactaagaatactttagtttttgttttttaactcctattctcttggacctgaaggaagactgtattctaaaaagtaaaatttcaggaaaaaacagtagtaactaatatggttaacagagaaacagattaaaaatatctttgtgagatagttgattgaaaaatggagactattttgacaggccaagagcatacacagtataaaaccacatagctccaaaaggtatattcagggatgaagtggttaagtttggcgggagtggagagatttgattaaagtttgcttttagcttccatatttccaatattaattgtagttataccatgtcagtagtgaaatttacctttaaagcctaatcagccaaagaccaccagagacaaagcctgtagtctgacaatttcagattgttatgtaacttgtgtaccatactgtagaagttttgataaaaggctttatttgcctgttgtttaggcaactccttaacatgcctgtgacagctgaaacccttatacaaatcctttagctaataactacagcaggcgctatttgtgctatggaaataaagcacgattcttagatgacattttctctttccccttttttccccctaacctcaatctaggctcacttatctaaagaatatgaggaggctaatttcagagctatatgtgcgagataactgccaccctttcaaagccactgtgttggtttggattcagcttccaatgtggatcttcatgtcttttgctctccggaatttaagcacgggggcagcacattcagaaggtaattattgtatgtcttctcccaaagaagttctctaacattgtctttgtactaaaaaaaaaaaaaaaaaaaaaaaagcatacttttcataattacgatatgtttactatcttccttataagggtatagaatttaaagtcttaagtgtaaacagattggttgtgttgtgaacattttgtattgagaaaaaatatatatattgtgcgtgaaaaactggaataaatccagtgcagatctttcctgtgagggacaccttattggaattgtcagactacttatttatgtcttatatatttttctctgctatttttaggacttctattgttttatttataaaactgttttagcaggtttttctgttcaggaacagttagctactggtggaattctgtggtttcctgacctcactgcacccgactccacttggattctgcctatctctgttggcgtcatcaatttgttaatagtggaggtcagtagttttaaatgaaatttgtttgccatttatggggatttttgttgctgctgttttgacttcaaatctgtttttgtttgagttggtgaagatagctctgagttagaagtgagatcccttggttcctggttccacgtcaggcattggcttaggcctgtcccttaacctctctgggcctcagaactctcgaaattaaagtaaaagcactagtatacttccaagtctctttcagcttcaaaattatatgattctgatacatagaattttgtgacttgcttttggcaaaaacagtaataaagatgcccagtcaatctggttgtattcttaaaatagagtgatgttccgtgtgtgtgtttaatatgtgaatttgtaggcggagaacacaagtcaggccctgactgctattttcttgctttatgaccttagaaaagtcattgaatgtctttataagatgaaatgggaaaaacatacacatagaaaatgtgacctctcagtcatgtctttttttttcttttttttttgagatggagttttgctcttgttgcccaggccggagtgtaatggcgcagtcttggctcactgcaacctctgcctcctgagtagctgggattataggcgcacaccaccacacccggctaatttttgtatttttagtagagacagggtttcaccatgtttgccaggctggtctcgaactcctgacctcaggtgatccacccgccttggccttccaaagtgctgggattacaggcatgagccactgtgcccagccctctcagtcatgtcttaacccttatcacaggctgctttactcagcagtttagggaaagcgtgcatataatttcataaattgttctcagactctgagtagaacagactggactggaagaaatcttaaaaatgatttacctcagtagagatctcccagacctcatgacctctgatgcctgtttgtgaaatctaatataccccttattctttcagatgaggaaaatggagatgatagaatataaggtcttaagtgaaagtttcttgaggaaagactctacctgtagtccaaatatgtttccctaagagcactagcacagtcccctgtggttggtgttcagtgaatatttggtagaaagaaggaagtgataagcacaaggttacagtgaatcaatgtcaatcccctagtcttttcctctatgtcatctaaagactaataaaggtgttttcatagcggggcatggtggcgtgcgcctctagttccagctacttggaagctgagtcaggaggattgtttgagcccaagagatggaggctgcagtgagttgtgatcccaccactgtactctagcctgggcgacagagagaaagacctcacctctaaaagaaaaataaaagcttattaaaagcttattcttactcaacatacactatgtgcaaggcattgtgttttttgtttgtttgtttgtttgtttttttcttgagacagagtctcactctgtttcctaggctggagtgcagtggtgtgatctccactcactgcaacctccacctcccaggttcaggtgattctcttgtctcagcctctcgagtagctgggattacaggcgcccgccaacacacccagctaattttttgtatttttagtagagactgggttttaccatgttggccaggctggtctggaactcctgacctcaaatgatccgcccgcctcagcctcccaaagtgctggaattacaggtgtgagccactgtgcctggccataggcattgttataagcaatttacataaatcaactcatttacttcttggaataaccctgtgagctaaatattatccttttttaatgcagagaaagtgaggcataaaaatgtaaaactacgtagtttggctctagagtcataattatggagaagtctttttttttttttccttcttttcttttttttggagacggtcttactctgtcacccaggctggagtgcagtggcgtgatctcagctcactgcaacctgtgccttccaggcttaagcgatcctcccacctcagcctccctcctgaatagctgggactgcagacatgccaccacgcccagctaatttttgtattttctgtagagatggtttcgctatgttgcctaattgcctaggctggtctcaaactgctgagctcaaacaatcggcctgcctgggcctcccagttctgggattacaggcccccagccttacgcagaattcttaagtggagcttgaagaatcctgtgacagtagctaccatataaatcattgttaagtggagcttgaagaatcctgtgacaatagctaccatataaatcattgcccttgttttttggtacaaagtgtcaaaaaacctccgtttaagaatttgacataattagtgttttttttttgttgtcgttttttttaagagacaggatcttgctgtattgcccaggctggagtgcagtggcatgattatagctcactgtagcctcaaacttctggactagagtgatccttccacctaggccagttaagatttttaaaagatggatgatcaagctgagtgcagtggttggtgcatgcctattatcccagctacttgggaggaggaggcgggaggatcacttgagcccaggagtttgagaccagcccttaaactggtctcagtttgatagcaagacaggtctcaaaaaataaaaagatgatcagccatataaattaatcagtgttttgtgtgtatatatataacttttattaaagtgtagatggaggccagtgaaaaatcagtttatattttaaagcttgtctgatttaatatgcgttttaataatcattatgcatgtatatgttctaccccttcagatttgtgctctacaaaaaattggaatgtctcgttttcagacgtatattacgtactttgtccgtgcaatgtcggtgttgatgataccaattgctgcaacggtaccctcagtgagtaagcaccaatattgtgtgtagcatgtgctaaatcctctctgactttagcttagactggctgggatcctgcctcttctttttttttttttttttttttttgagacggagtctcgctctgtcacccaggctggagtgcagtggcgcgatctcggctcactgcaagctccgcctcctgggttcacgccattctccggcctcagcgtcctgagtagctgggactacaggcgcctgccaccacgcctggctaattttttgtatttttggtagagacggggtttcaccatattaaccaggatggtctcgatctcctgaccttgtgatcctcccgcctcggcctccgaaagtgctgggattacaggcgtgagccaccgcacctggctgggatcctgct

SEQ ID NO: 277 - DNA, 1542 bp, Homo sapiens
aggggcaagcattgatgactttatacagtctgtggagcaccagaacatagctttagaagtggatgcatttggaactagaaatggcacagatgacccatcttataatggagccatcacagtgtgttgtaatgaaaaggtatgcaggtctctaataatctttctgaaaaatgtgaaaagctaacataatatcaatatactcaggcttccaacttaagaaataaaaatgaaaagcaaatactgttttcatttattacttagtgaattgtattcactggcataaacaattcatatatccatcattgtctactggcacaaactattagcaaaatacatactatagaatacctactatcaagactatatataagttcgaacatttcatgtttcccctcaaggattttataacacatgtattccaaaacttctgttttgttcttaaacaataaacactgaacatatgattctggcctcaagcaagacatccggtgtcctaaatatcagatacatgatttagttttactatatacatgttttgatttacttatacagtatttgattttacttacacagtgtttggctttttattgtgattatttaacaccatatgaaaaacataacctcttaatttaacatgtcaaattttgacttttttagagaacaaaatgaagatatttgagaacttatatcctacttgttatattttagaattacagcttttcgttagcatgcaatgccaaaagattgaattgcttcccagttcttatggacattgttagtaatgggctacttggaatggttaaaccatcagtacatatccgaactgaaagaagtacatttttggaggtaaatatatataatcttacaattcctgactctcctctatcaggaatctcccagatcacccttttaagtgctggaatcttgtttttattgagtaaaccactgcataataaattaacatttggactcattctagttctgtgactttggaaaatcaatacgttttcagagcttcaatttgtttaaagtaaaataaaatgaacaaaacatttttcaaagagaataatgagatcacatggacacaggaaagggaatatcacactctggggactgtggtggggtggggggaggggggagggatagcattgggagatatacctaatgctagatgacgagttagtgggtgcagcgcaccagcatggcacatgtatacatatgtaactaacctgcacaatgtgcacatgtaccctaaaacctaaagtataataaaaaaagaaaaggaaaaaaaaaaaaagagaatatgaagcaataaaaatgaaatcttacagcactgtgaccagcacaagaatagtgaacaaatgaaacaaaggagaaaggaaggaaagaatgaaggaaggaaggaaggaatgaacgaatgaatgaaggaaggaaagaacaaaggaaggaacaaatgaaggaaggggctttattattacttttagaaattttacaaaagaaattcaagacaaagttcaggctagaatttcagactatctacattag

SEQ ID NO: 278 - DNA, 6252 bp, Homo sapiens
cacctgagtcagcaggacctggaatcccagatgagagagcttatctacacgactcagatcttgttgtcacccccattattgacaatccaaaggtgcagaaagcactctgacaagtgagttgtagactttactgagatctgaaatctgcataagattttcattcagaatattatttactgtctaatctttcctgtttctcttgtccgctactctttcatttgtgctgcatgtctgcatttccagctcccgctctgtctgcaaccctttcctctgccttcacttccgcttcactggagttctaagttttcccccctctgttttgaatgagtcagctctgcttctcactactgctttcttccacatgccacggaggggttgccagcctcttgacctcagaccttagctctcagtcccatcgtttctccatctgcactaatgtgaatcactctaagtattctagtctctgatgtgttttgaaggcagaagcagtcagagggcactgctcaccaggctgggctgggcaggcagatcacacggaagccctgccctgtcacaggttgttaatactgcaggggagatggtggggagacactatgggaacttgaggagtcatggttcacaatgtacttctaaaccactgtgagtttttttgcttcttgtcttttggaatataatactttattgctgggggataatgagtatttactttaaaaaacagatgcatttctaagtccctctgttttgtcttgacttccagctccccaacatactcacattccactacttattctctattttaactttactgcttcttttacttttttttagttttacttttattttttatttttttgagacagagtcttgctctgtcacacaggctggagtgcaatgacgcgattttggctcactgcaagctccgcctcccaggttcatgtcattctcctgcctcagcctcccaagtagctgggactacaggtgcccgccaccacgccctgctaattttttgtatttttagtagagacagggtttcaccatgtaagccaggatggtctcgatctcctgaccttgtgatccacccacctcggcctctcaaagtgctgggattacaggcatgagccaccacacctggccttctttttcttttttaaatatctttttctgtattaattcatgactgtttttttcttgtctcattgggaacattagtgtggtttagaacaatgtaagggtttttggattcatgtttattttctagatagacagcattttatatagatgatttagctgtttttcataatggagctaattctttttgtgagttcatatgtctggcagtgtaactttattatgctaagtttgatgtgcattggcgcattttcaaagtgggctttctagaacaatttgtgatatctttcccaggggtgtccagtcttttggcttccctgggccacactggaagaagaattgtcttgggccacacataaaatacactaacaatagctgatgaactaaaaaaccaataaaaaaaaattgcaaaaaaattcttacaatgttttaagagagtttatgaatttgtgttgggccatattcaaagccgtcttgggccgcatccagcccacgggctgcgggttggacaagcttgctttacacaatattctgtgtttccttttttcctcttataaccatatttgatagtttatgggaagccttcatcagtggaaatttttgtgtttaacttttaattctaaactacttttagagaaaagattaaaaaatagttgagaactcctgtatagcttttgcccagctgctcttaatgttcacatcttataggtctatagtatagttagcaaaacctgggaattaacattggtatagtgttagtcaggcgggataatccttacctgtgcctccttttggagggcagcagaatgtggtagttggagttgcatgatacttgattcatatctctgtgtaatgatggcatgcaataccctgactgctcctttcgaattcttcctgaaaagggaaaaataaaacatgagaatagtgctgctaactaccaaatgcatttgaattttaccggttgcctctaatgtcctctttttttttgttccaggatcccacattacagttagttgttatgcctccttagtctcatatagtctgtcctagtttttcacggttttgtcagaatttctcagactttgcttgtctttcatgaccttgacagtttgtcttttattttgttttgttttgttttttgtcacccaggctggagtgtagtggcgcgatctcagctcactgcaacctctgccgaccgggttcaagctattctcctgcctcagcctcatgagtagctaggattacaggcacctgccactgcacctggctaagttttgtagttttagtagagatggggttttaccatgttggccaggctggtcttgaactcctgacctcatgatccacctgcctaggcctcccaaagtgctgggattacaggcgtgagccacggcacctggcctttgtatgtttttgtaatacatgttataaaacgtatgactcaagtccttgacactttgaagagtaactggttgggtgttttgaagaatgtcccttaatttaggtttgtctaagggtttctcatgactcgaatgagattatgaatttggattatgagattagaatgagaatatgcattttagtaagaatactacagtaaatacagtaatgctggttacttaattagtaaaggttttaaaaatattacatatagaagttttgcagaagttaggtatagaaatgatggttgaatttttaattaaaagtctcaagatgcagtatctggctgtcctaagctcatggatccaactacatggtttcttcacatttctcaaataaattatgcactttccaattcatgctattatggcttccttgaatggtgtcttctctgatataatcataaagttctagccatccttcaagaccgcaacccaccttctacctcttccgtaaacccggtgtcaactatatcaagtaaagtgcttgctgtattctctaaactactatttacaaaaaaaattctttctgtccagggttttgtctgtagttatgtcctgcctcttttgaattgtgaaatattttcttgtttatcaaatgtttgtctcatcttcccaaccagaaagtcagctcgctgaaaataggattgtgtcttttatatctttgtatcccccttagcacttgacatagagccttaccttggcaggtaagcaatagatatttgttgaaagactgaatttctaattagacgtaaattacctaaaaagtaagccaggatggggtgaattttttctttgaagctttattttattacagatatcaattgaaatgattttaaaaaataaattattatctatatatgtatgttttaatctgaaaaggcatcgttctttttgtttttggtaacaaattttacacattctttttttgtcctcattgatttattatctgatataagggacatataaggagacagatatccatctttaaaattgcctcaaaagtttttttttttttaaccacagataatgaaacaaccaccatcggttaaatttgatgcaaaaatattgcatctaccagcattttcaggtaggatcataaaggagttatcgaacatgtagactgtctgtatacagatacgaatatgaaatttattcacaaatggaatatttgtatgtgaacaactaaatttattttgtcttgacaattggttatattcttgggtcagtgttatgtgaattgtaaataatctgtaattcatttgtgccagctgttgacatttctcagctgagtctgggctgccctgtcctcttgtgagtggggaggttcctgtagatctgggcaagttttcctgtagagtgggtggggggcctcctcccttccgttcatagagctggttgaatttccaccatttatggcaggtgtaggtgcacagggttggggacaagaaggaaggattgggattctattggcgggaccaggacatttgagaacgggactaggtggttcatgactgtggagatggtgtgggagtggagatacttaagggataattattacatttctgttgagctaatgaaaatcttatttacggtgaaagtcagaaatttttacataccttaaactttttttttttaacaaattatattttaagctgttaaactcaatttggggaaaattattcattgtggctagagtagaatctatgatttgaagtaaatttaaaatatatttaggtttaaataaaccagctaagggtttatatcagtcaacttaattagtgataaaaacaaccaaaaaaacctgtgtagaaggacgtttttgaaagaccaaagtgaagcaaaatattaatagtgctttcagtgccaagtaggtctatttatgcaaacctagagaattattattgggaaatactatttcctttttcttctttgagttacttaggaaattatatttacaatttctttgtctaaagattgagatcagcaaaaacatgttagcaaaaaattttagggagtatcacatttcctagattttgccctttttttatagggattaggaggtaggaatttcaggtgattttagctatcatgttatcctcgttatttttttacagtaatttcattggaactttttaataactgtgtggtttgtgcttttctcaatatctgagagttgatttatttatacaaaggcttttttgtcttttactccagttgtattgaactttgcattttgttataatctaggttgtgagacaattctgctttagacatctgcttggtttgaaagcatagttttccattgaagtgtttaaaaagtttccatggatagataaagagatgaggaatatagaaggacaaatagaagtagtgtcatctttggagtatttttggtgttgacagagtaatgttttctttgtcctcatcttagctgtcgtaactctgtgtttatttctcatgtaatgtttccagcagttgtttttctcatcatcatacgtttgttattttgtttccttggcaatggataagttataatttctgaaagaccaagattggaatgactttttgtaacaagtgtgctcgcagatcgactccagtgagaagagctcggggacctcctgagccaagcttaatctcctttgctgtttgtgagtggtggctggtcaccaggaggtggccaccaggctcctcctttccccgctggtaggcctctgtgacatgacttatgcatttaaatttatgttttttatagaggctcaaacaagtgctaaaatagcaatttgatttaactaccatgaaaaaactgatttatcacgattttaggtttatgcaaattatcctctgcttaatccttacgtcttaaagtagataagagtagacggtgattttgaactttttgttgttgttgttgtttgtaatactcaggtttccattttatgttaacttgtaagatttttaaaaaatatgtgaaatcaggccgggcgtgatatcataagacagaccttttaccttctcatcagtgactggaatgaacgcctgtaatctcagtactttgggaggccgaggcaggtggatcacctgaggtcagcagtttgaaaccagcctggccaacatggcgaaaccccatctctactaaaaatacaaaattagcagggcgtggtggtgcactcctgtaatcctagctacttgggaggctgagacaggagaatcacttgaacccaggagccagaagtcgcagtgagccgtgatcatgccattgcaccccagcctgggcaaaaagagcgaaaccccatctcaaaaaataaaaacaaaaaacaaacaaaaaaaaatgtgatatcataagacagaccttttcccttctcatcagtgactggaattaactgcccatgtggaacgggttgtgggtgttggttcctttactgggtcatctggtaaactgcaaggtttctgctgtgacattgaaggcagacatcaaccctctaagacatttttttcctatcctctgggaatattactttttggacaatcttggtccattggtaagctcatgggaatttgtcagagtttttttgtttcttttggctcatgtttagcatcgattggcagagtgtttggagtcatcctcagaaaggaattacagtggttcggaggtgttttctgtagtgggccctcatttgggaat

SEQ ID NO: 279 - DNA, 6254 bp, Homo sapiens
cacctgagtcagcaggacctggaatcccagatgagagagcttatctacacgactcagatcttgttgtcacccccattattgacaatccaaaggtgcagaaagcactctgacaagtgagttgtagactttactgagatctgaaatctgcataagattttcattcagaatattatttactgtctaatctttcctgtttctcttgtccgcttctctttcatttgtgctgcatgtctgcatttccagctcccgctctgtctgcaaccctttcctctgccttcacttccgcttcactggagttctaagttttcccccctctgttttgaatgagtcagctctgcttctcactactgctttcttccacatgccacggaggggttgccagcctcttgacctcagaccttagctctcagtcccatcgtttctccatctgcactaatgtgaatcactctaagtattctagtctctgatgtgttttgaaggcagaagcagtcagagggcactgctcaccaggctgggctgggcaggcagatcacacggaagccctgccctgtcacaggttgttaatactgcaggggagatggtggggagacactatgggaacttgaggagtcatggttcacaatgtacttctaaaccactgtgagtttttttgcttcttgtcttttggaaatataatactttattgctgggggataatgagtatttactttaaaaaacagatgcattttctaagtcccctctgttttgtcttgacttccagctccccaacatactcacattccactacttattctctattttaactttactgcttcttttacttttttttagttttacttttattttttatttttttgagacagagtcttgctctgtcacacaggctggagtgcaatgacgcgattttggctcactgcaagctccgcctcccaggttcatgtcattctcctgcctcagcctcccaagtagctgggactacaggtgcccgccaccacgccctgctaattttttgtatttttagtagagacagggtttcaccatgtaagccaggatggtctcgatctcctgaccttgtgatccacccacctcggcctctcaaagtgctgggattacaggcatgagccaccacacctggccttctttttcttttttaaatatctttttctgtattaattcatgactgtttttttcttgtctcattgggaacattagtgtggtttagaacaatgtaagggtttttggattcatgtttattttctagatagacagcattttatatagatgatttagctgtttttcataatggagctaattctttttgtgagttcatatgtctggcagtgtaactttattatgctaagtttgatgtgcattggcgcattttcaaaatgggctttctagaacaatttgtgatatctttcccaggggtgtccagtcttttggcttccctgggccacactggaagaagaattgtcttgggcaacacataaaatacactaacaatagctgatgaactaaaaaaccaataaaaaaaattgcaaaaaaattcttacaatgttttaagagagtttatgaatttgtgttgggccatattcaaagctgtcttgggccgcatccagcccacgggctgcgggttggacaagcttgctttacacaatattctgtgtttcgttttttcctcttataaccatatttgatagtttatgggaagccttcatcagtggaaatttttgtgtttaacttttaattctaaactacttttagagaaaagattaaaaaatagttgagaactcctgtatagcttttgcccagctgctcttaatgttcacatcttataggtctatagtatagttagcaaaacctgggaattaacattggtatagtgttagtcaggcgggataatccttacctgttcctccttttggagggcagtagaatgtggtagttggagttgcatgatacttgattgatatctctgtgtaatgatggcatgcaataccctgactgctcctttcgaattcttcctgaaaagggaaaaataaaacatgagaatagtgctgttaactaccaaatgcatttgaattttaccggttgcctctaatgtcctctttttttttgttccaggatcccacattacagttagttgttatgcctccttagtctcatatagtctgtcctagtttttcacggttttgtcagaatttctcagactttgcttgtctttcatgatcttgacagtttgtcttttattttgttttgttttgttttttgtcacccaggctggagtgtagtggcacgatctcagctcactgcaacctctgccgaccgggttcaagctattctcctgcctcagcctcatgagtagctaggattacaggcacctgccactgcacctggctaagttttgtagttttagtagagatggggttttaccatgttggccaggctggtcttgaactcctgacctcatgatccacctgcctaggcctcccaaagtgctgggattacaggcgtgagccacggcacctggcctttgtatgtttttgtaatacatgttataaaacgtatgactcaagtccttgacactttgaagagtaactggttgggtgttttgaagaatgtcccttaatttaggtttgtctaagggtttctcatgactcgaatgagattatgaatttggattatgagattagaatgagaatatgcattttagtaagaatactacagtaaatacagtaatgctggttacttaattagtaaaggttttaaaaatattacatatagaagttttgcagaagttaggtatagaaatgatggttgaatttttaattaaaagtctcaagatgcagtatctggctgtcctaagctcatggatccaactacatggtttcttcacatttctgaaataaattatgcactttccaattcatgctattatggcttccttgaatggtgtcttctctgatataatcataaagttctagccatccttcaagacctcaacccaccttctacctcttccgtaaacccggtgtcaactatatcaagtaaagtgcttgctgtattctctaaactactatttacaaaaaaaattctttctgtccagggttttgtctgtagttatgtcctgcctcttttgaattgtgaaatattttcttgtttatcaaatgtttgtctcatcttcccaaccagaaagtcagctcgctgaaaataggattgtgtcttttatatctttgtatcccccttagcacttgacatagagccttaccttggcaggtaagcaatagatatttgttgaaagactgaatttctaattagaggtaaattacctaaaaagtaagccaggatggggtgaattttttctttgaagctttattttattacagatatcaattgaaatgattttaaaaaataaattattatctatatatgtatgttttaatctgaaaaggcatcgttctttttgtttttggtaacaaattttacacattctttttctgtcctcattgatttattatctgatataagggacatataaggagacagatatccatctttaaaattgcctcaaaagttttttttttttttttaaccacagataatgaaacaaccaccatcggttaaatttgatgcaaaaatattgcatctaccagcattttcaggtaggatcataaaggagttatcgaacatgtagactgtctgtatacagatacgaatatgaaatttattcacaaatggaatatttgtatgtgaacaactaaatttattttgtcttgacaattggttatattcttgggtcagtgttatgtgaattgtaaataatctgtaattcatttgtgccagctgttgacatttctcagctgagtctgggctgccctgtcctcttgtgagtggggaggttcctgtagatctgggcaagttttcctgtagagtgcgtggggggcctcctcccttccgttcatagagctggttgaatttccaccatttatggcaggtgtaggtgcacagggttggggacaacaaggaaggattgggattctattggcgggaccaggacatttgagaacgggactaggtggttcatgactgtggagatggtgtgggagtggagatacttaagggataattattacatttctgttgagctaatgaaaatcttatttacggtgaaagtcagaaatttttacataccttaaactttttttttttaacaaattatattttaagctgttaaactcaatttggggaaaattattcattgtggctagagtagaatctatgatttgaagtaaatttaaaatatatttaggtttaaataaaccagctaagggtttatatcagtcaacttaattagtgataaaaacaaccaaaaaaacctgtgtagaaggacgtttttgaaagaccaaagtgaagcaaaatattaatagtgctttcagtgccaagtaggtctatttatgcaaacctagagaattattattgggaaatactatttcctttttcttctttgagttacttaggaaattatatttacaatttctttgtctaaagattgagatcagcaaaaacatgttagcaaaaaattttagggagtatcacatttcctagattttgccctttttttatagggatttggaggtaggaatttcaggtgattttagctatcatgttatcctcgttatttttttacagtaatttcattggaactttttaataactgtgtggtttgtgcttttctcaatatctgagagttgatttatttatacaaaggcttttttgtcttttactccagttgtattgaactttgcattttgttataatctaggttgtgagacaattctgctttagacatctgcttggtttgaaagcatagttttccattgaagtgtttaaaaagtttccatggatagataaagagatgaggaatataaaaggacaaatagaagtagtgtcatctttggagtatttttggtgttgacagagtaatgttttctttgtcctcatcttagctgtcgtaactctgtgtttatttctcatgtaatgtttccagcagttgtttttctcatcatcatacttttgttattttctttccttggcaatggataagttataatttctgaaagaccaagattggaatgactttttgtaacaagtgtgctcgcagatcgactccagtgagaagagctcggggacctcctgagccaagcttaatctcctttgctgtttgtgagtggtggctggtcaccaggaggtggccaccaggctcctcctttccccgctggtaggcctctgtgacatgacttatgcatttaaatttatgttttttatagaggctcaaacaagtgctaaaatagcaatttgatttaactaccatgaaaaaactgatttatcacgattttaggtttatgcaaattatcctctgcttaatccttacgtcttaaagtagataagagtagacggtgattttgaactttttgttgttgttgttgtttgtaatactcaggtttccattttatgttaacttgtaagatttttaaaaaatatgtgaaatcaggccgggcgtgatatcataagacagaccttttaccttctcatcagtgactggaatgaacgcctgtaatctcagtactttgggaggccgaggcaggtggatcacctgaggtcagcagtttgaaaccagcctggccaacatggcgaaaccccatctctactaaaaatacaaaattagcagggcgtggtggtgcactcctgtaatcctagctacttgggaggctgagacaggagaatcacttgaacccaggagccagaagtcgcagtgagccgtgatcatgccattgcaccccagcgtgggcaaaaagagcgaaactccatctcaaaaaataaaaaccaaaaacaaaaaaaaaacgtgatatcataagacagaccttttcccttctcatcagtgactggaattaactgcccatgtggaatgggttgtgggtgttggttcctttactgggtcatctggtaaactgcaaggtttctgctgtgacattgaaggcagacatcaaccctgtaagacatttttttcctatcctctgggaatattactttttggacaatcttggtccattggtaagctcatgggaatttgtcagagtttttttgtttcttttggctcatgtttagcatcgattggcagagtgtttggagtcatcctcagaaaggaattacagtggttcggaggtgttttctgtagtgggccctcatttgggaat

SEQ ID NO: 280 - DNA, 685 bp, Homo sapiens
agaaaatgtttaataataagggtaattcttattatacgtcttctaatgttactctcgcaaagtaaaatctggtaatagaaagtaggatttttaggtaatggttgagcatttaatactttgagaaggcttatggtatgctcattaaaaatgaatcaatgaaatatgtatttaaacacttttatttaaaacgtgttatatacctgaatggggtgctccctgctgacattttcagacagacattccaaatcatttccgagaacagtcatccctctgtatcagccaggagaatggttctagtatccccttggatactaaaattaacacatactgttttttcccccactgttaaaaattgaggtttgattgtaaaacagttttaatttgaataaaatgatactgaggtagacaagttctctggtaggaatcttcttttattctctttctccatccaaagccacttccagcgaggttttctctgacctcaggttatattaccttgatagcatatgataaagggtccttaacttagtctgggagataattattattgaagtagatacttagttttgttttgcttataaaaaattagaatcacatgatatagttttttatgtttgttttcccccataacatatatattatgtattttaaatgttatcaacattttaaaataaaatacataata

SEQ ID NO: 281 - DNA, 190 bp, Homo sapiens
taaaatacttcaaccctgatccctgtgtattaatttagttatacttcctcaaagtttcccttgggcacccttatctgtccctatgtagcacatagcttccctatgatgttatttataatctaatgagattaattatgatttataaactcccgatggaaggaagtgtccttactttttatagaagcaacat

SEQ ID NO: 282 - DNA, 7661 bp, Homo sapiens
aacaggaagcggcccctcccggcttcggagccgccggtaagtcgtccagcggagccggctgcgagccccgcggccgggtggggtgaggtggggtgcgcttccggggaaacgcagctgcggtcgctcgggaaccacgcctggcaggtcaggcaggtcttccctcagcccagccctgctcacgccgcgtccggactttgccgtccagtgtcggggacccccaccgctgccgcccgcggtccagctccctctccatcctttcagaccgctccacccctctcacagcctttgtcctggcgtttccaggctgggtcgctcctttctcccctttcgccgaggtcttcctccttccaccctccacccccaagaaagatctttgcccttccgtcatgagattccgtctgccctcgtccgggccacccgcagcgggaggctttcatctcctgtctcggcgcggcgggctgggaacggaggggcagctggatggtggaggggcctgagcctcagggacctgcccccactgctgccattcaccctccctaacgctgccgtggacacccgcctcctccataccctctgataccttctgggccccgcgtgagaaaccccctcgggcacccttcaggtggcgtgggagggggcgacaaagcgaggctttgtctccggagattcctgggagagcgcgcccgggcgcacagggggcggggcggggtaggggtcgatcagggaggggggaacctgggaggggcgcacccggctgcggtcgacccccagccctacccacggccccctggagtagggcacattcacagaggaagtgttttgaccacagtgcgtcagaaatagacccaggcctccgttccccagtcagtcgcaacatcctcccgccgtttgttgaggcagtttggtggagggaagtggaacctacgcggacagaggctgtttctctgtcaggaggcaagcacgagtgctgaggaaaactttgcccttgccatgagacacttctcagacacagcgtggcactgaggccatcaaggggcgccggcacagggacgcttggagggagatggggcaggatgtatgctcagcagctggggttgtgggtatcagatctgtccctgtgttgcatgcaaaggcagctctgtcctctccacatctaagaaatccccgcacaccctgattccaaggcctaaggaaggcaggctaagaattcctaccccagggcttggagatccctggacagggaggctgaactggaggctcccctggtgtcccatgtgccctctgtgcccaagactaatgtttttcacttccaaatttggcaaatttcacttggagtggactggatagcagctgtctctggagcagatgctggcaggggaatgggctgggaggagcagagccaatcactggtgaatcccgagctccctggggacaccagcctgctctcttcgcctccccttcctttttatttcttctgttctccagcctcttccccttctttttccacctctccagccactcatctctgcccagctgctgccctccccaggaggcctccatggcttcacctacctccaccaacccagcgcatgcccactttgagagcttcctgcaggcccagctgtgccaggacgtgctgagcagcttccaggagctgtgtggggccctggggctggaacccggtggggggctgccccagtaccacaagatcaaggaccagctcaactactggagcgccaagtcactgtggaccaagctggacaagcgagcaggccagcctgtctaccagcagggccgggcctgcaccagcaccaaggtggatacacggtgcctgggatggggtgtggagcatgcggggagtcagaggacggacaggatgccatgccctcactgccctgtgtgttcacagtgcctggtggtgggtgctggaccttgcgggctgcgggtcgctgtggagctggcgctgctgggggcccgagtggtgctggtggaaaagcgcaccaagttctctcgccacaacgtgctccacctctggcccttcaccatccacgacctgcgggcactcggtgctaagaagttctacgggcgcttctgcaccggcaccctggaccacatcagtgagcaccacgtggtggcctggaggggcgggtgagcttgggcctagaggcaggccagtggggaaatgctgggacagccaaatgtcgaagtggacaagatccgtatcagccaggtgaccttgaagattcaggtcccccatctataagtgggcttttgggctgagtgattgctaaggccttttccagtctgaccctgaccaggcacacactggtacatggggagcttgtgctgccctagggtccctgttcctaatgtcctctcccttccaggcatcaggcagctccagctgcttctgctgaaggtagcattgctgctgggggtggaaattcactggggtgtcactttcactggcctccagccccctcctaggaagggtaagtatttctatgctccctggaatctccccctcccccatcaagaacttggccagtgtctgaaaaaggatgggccaggagtgtccttttctgtttttgttttgagacagagtctcgttctgtcacccaggctggagtgcagtggcatgatctcggctcactgcaacctctgccacccagtttcaagtgattctcctgcctcagcctcctgaggagctgggattacaggcatgtgccaccatgcccagctaatttttgtatttttttaagtagagacggggtttcactgtgttggccaggctggtctcgaactactgacctcaagtgatccacccacctcggtctcccaaagtgctgggattacaggcgtgacccaccatgccagccaggagtctccttttctaatagtgtggccttgggcaagccactctgagcctcagattgagcatttgcaaaacaagaataacacttccttcctcacctgccttccatagctgctgtgaaggtgtaatctgatagataatatatcattgctttctaaaccagagagtcctttacacgttttgatgatttcactggtttgtcctgagagtataggggctcttacgacttctacacctttgtgcctctcataccccctgccctagggagtggctggcgtgcccagctccaacccaacccccctgcccagctggccaactatgaatttgacgtccttatctcggctgcaggaggtaaattcgtccctgaaggtgagtgatcacttccctcaaagaagccagcatctctggcacatcctgggcctttctagattgttataaccccctcctcctgccattgttcacctaccgccacctctaggcttcaaagttcgagaaatgcgaggcaaactggccattggcatcacagccaactttgtgaatggacgcaccgtggaggagacacaggtgccggagatcagtggtgtagccaggatctacaaccagagcttcttccagagccttctcaaagccacaggtcagggaccctcttgctgaatttcccctccccctgcctgactgtggcctggctcctgcctctcccttccaaacttgtcctcactgcaaggaactccacacttttctgtttttttggtctcagcagcaaaggagaaggaacctgtcccctcagggattaagcaagcacagccctagttgatcacccagcatgaaaagtcctggaatctctcagagatgaacctgtgtatgggagttttgcttaagtggtacttcaagaaggtgcctctgtttactttggttttgcactgccatgcgaccaggtggtgcaggtctcccaaatgccacccccctccaagcttccctctttgctctaagtcctcaggcctcctgggcctgggacagatggttgtttgtgtcatcaggactcgtggggttctatgcgtggagcactcaccgcagcctaagctgggatcccagctcagaggtcaggccatgttgggatgtttagggaaggtgatgcattatcaggagacatatctactgtcccctgccctgtacccccaggcattgatctggagaacattgtgtactacaaggacgacacccactactttgtgatgacagccaagaagcagtgcctgctgcggctgggggtgctgcgccaggtgaggcccagtcctggccaggagaggctgggtggtgagccccgggaggcagaggctaggcttggacatagtcgacacctgggtgtggggaccccgtcctctcctgcctttgtcctggcattaacttcacctctaaaagttctcttggccaggcatggtggctcatgcctgtaatcccagcactttgggaagccgaggtgggtggatcacctgaggtcaggagttcaagaccagcctggccaacatggtgaaaccccgtctctactaaaagtacaaaaattagctgggcttgttggcgggcgcctgtaatcccagctactagggaggctgaggcaggagaatcatttgaacctgggaggcggaagttgcagtgagccaagattgtgccactgcactccagcctcggcaacaaagtgaaactctgtctcaaaaaaaaaaaaaaaaaaagttctcccctgggatttacaaggcagcaggaatcatattctgggctaaacaccttataccagccacagtagatgtgtgtcagctccatgagggcaggcatttctgtctctttgtctgttgcttgctgctaattgccagtacctggaacagtgccaaatacatagtaagcgctcggtatgtatttgctgaatgaatgaactagttgagtgcctaccatgtgctagatactgtgttgagagttaaatttgcatctcccatctaattctcatgagtaccctgataaattaggcatgttgtctctaagtgatggacaaactaaagctcttgagtttgtggcaagtatatgacagtaatgatatgggcagaacagagcctgggacacccagcagcagggtgaatgttgaagaaagggctttgagaattccaggctgctggaattctagtcccagctcagccttcaactgctgtgtagtctagggcagccccttccttctctgggccccaggatgtgcaccttctgcgcccaagggggtggcactggcccactgaccctgctctcagaggtctctgaggttctgctctgttgaccatacaggactggccagacaccaatcggctgctgggcagtgccaatgtggtgcccgaggctctgcagcgctttacccgggcagctgctgactttgccacccatggcaagctcgggaaactagagtttgcccaggatgcccatgggcagcctgatgtctctgcctttgacttcacgagcatgatgcgggcagagagttctgctcgtgtgcaagagaagcatggcgcccgcctgctgctgggactggtgggggactgcctggtggaggtgaggggttcaggaggcacaggggtttcatggttaggggagggagctgcctagtatggaggaggggataaaaaggtctgcctgcagaggggaggagctaaaggctgcctggtgtggggatggccccttctgctgtgacctgggtggatatctgggcttgggatgcacctgttggattctccctgagctgcttcctattcctctgacactgcagcccttctggcccctgggcactggagtggcacggggcttcctggcagcctttgatgcagcctggatggtgaagcggtgggcagagggcgctgagtccctagaggtgttggctgagcggtaagacctgagttgaggaggatgtgggcagggcaggacatgtgacaaggttcaggaagaggggcaggggtgctgagtgaatagacggaggaataggcagaagaaaaggcctggcagttcctgagaggtgggtgctgacaggtgccctcccattcatgcccctgccccttaccctcaccccctcagtgagagcctgtaccagcttctgtcacagacatccccagaaaacatgcatcgcaatgtggcccagtatgggctggacccagccacccgctaccccaacctgaacctccgggcagtgacccccaatcaggtcagacccccgacacacccaccagccttcccaagccaacccccttcccccaggtcaggccctccctgcccagtcgctgccctttggggtcaatcctacccccggcaggcccttacccctggactcaggggctgtgtggccagcctgccttgagacctgagcggggctgccttaggtacgagacctgtatgatgtgctagccaaggagcctgtgcagaggaacaacgacaagacagatacagggatgccagccaccggtgagcaggccttcctcccaaggggtgaccaaaatatgtactacccagcgaggcccaggtggtccctgcaaagcagctgcagcctcaggacaggagcagcgtgccggagcactcattgttggctggtgggttggttgggggcctgctggaggaacggaggggcagcaccgcacaggcagcagttggctgccagtctgaatgtaagcgcgttagtgtttgaaccaccgttacagccatagtggtgctggcaacctcccctgcccccagtttagtctgctgccctctatgtggccagttgcgatttcactttattcactcctctactttattccaaagagattttttttaaaagagaattgggatggagagctgctgatagtcagctttaggctggtgccctagtagaggtgggtccctgactccttctccccctacagaacccccacatgcagcagctgggctccctatatgcctgggatgggcagaggggcccttgggcacagcacagccttctttcccagggtcggcaggcacccaggaggagctgctacgctggtgccaggagcagacagctgggtacccgggagtccacgtctccgatttgtcttcctcctgggctgatgggctagctctgtgtgccctggtgtaccggctgcagcctggcctgctgtgagtccctggcagacccacctctctctcatgatctcagtgtaggagttagcatatccagttgaatcctagagacagtgtgcttccctgcatctgccgacagtcttgtgagactctaatgcattcagatagtggagagctttgtgaatggcacaggcccccaaagccaggagtagtgtcactgggttgggcactgggtagcagagactacacacctaccttcaagccttcttgtaccccagctgctgcttgctgtccctcccctcctgctgcccttcctcccctcagtggggctaggttcttgtctctagttggcttttctccctgacatcccacagggaaccctcagagctgcaggggctgggagctctggaagcaactgcttgggcactaaaggtggcagagaatgagctgggcatcacaccggtggtgtctgcacaggccgtggtagcagggagtgacccactgggcctcattgcctacctcagccacttccacagtgccttcaagagcatggcccacagcccaggtgacctgaaggaaaggcgggcaggataactgggatggggaggtgtgtgtgtgtgtgtgtgtgtgtgtgacagagggagaaggcggtgtgtgtgtgtgtgtgtgtcag

SEQ ID NO: 283 - DNA, 11696 bp, Homo sapiens
aacaggaagcggcccctcccggcttcggagccgccggtaagtcgtccagcggagccggctgcgagccccgcggccgggtggggtgaggtggggtgcgcttccggggaaacgcagctgcggtcgctcgggaaccacgcctggcaggtcaggcaggtcttccctcagcccagccctgctcacgccgcgtccggactttgccgtccagtgtcggggacccccaccgctgccgcccgcggtccagctccctctccatcctttcagaccgctccacccctctcacagcctttgtcctggcgtttccaggctgggtcgctcctttctcccctttcgccgaggtcttcctccttccaccctccacccccaagaaagatctttgcccttccgtcatgagattccgtctgccctcgtccgggccacccgcagcgggaggctttcatctcctgtctcggcgcggcgggctgggaacggaggggcagctggatggtggaggggcctgagcctcagggacctgcccccactgctgccattcaccctccctaacgctgccgtggacacccgcctcctccataccctctgataccttctgggccccgcgtgagaaaccccctcgggcacccttcaggtggcgtgggagggggcgacaaagcgaggctttgtctccggagattcctgggagagcgcgcccgggcgcacagggggcggggcggggtaggggtcgatcagggaggggggaacctgggaggggcgcacccggctgcggtcgacccccagccctacccacggccccctggagtagggcacattcacagaggaagtgttttgaccacagtgcgtcagaaatagacccaggcctccgttccccagtcagtcgcaacatcctcccgccgtttgttgaggcagtttggtggagggaagtggaacctacgcggacagaggctgtttctctgtcaggaggcaagcacgagtgctgaggaaaactttgcccttgccatgagacacttctcagacacagcgtggcactgaggccatcaaggggcgccggcacagggacgcttggagggagatggggcaggatgtatgctcagcagctggggttgtgggtatcagatctgtccctgtgttgcatgcaaaggcagctctgtcctctccacatctaagaaatccccgcacaccctgattccaaggcctaaggaaggcaggctaagaattcctaccccagggcttggagatccctggacagggaggctgaactggaggctcccctggtgtcccatgtgccctctgtgcccaagactaatgtttttcacttccaaatttggcaaatttcacttggagtggactggatagcagctgtctctggagcagatgctggcaggggaatgggctgggaggagcagagccaatcactggtgaatcccgagctccctggggacaccagcctgctctcttcgcctccccttcctttttatttcttctgttctccagcctcttccccttctttttccacctctccagccactcatctctgcccagctgctgccctccccaggaggcctccatggcttcacctacctccaccaacccagcgcatgcccactttgagagcttcctgcaggcccagctgtgccaggacgtgctgagcagcttccaggagctgtgtggggccctggggctggaacccggtggggggctgccccagtaccacaagatcaaggaccagctcaactactggagcgccaagtcactgtggaccaagctggacaagcgagcaggccagcctgtctaccagcagggccgggcctgcaccagcaccaaggtggatacacggtgcctgggatggggtgtggagcatgcggggagtcagaggacggacaggatgccatgccctcactgccctgtgtgttcacagtgcctggtggtgggtgctggaccttgcgggctgcgggtcgctgtggagctggcgctgctgggggcccgagtggtgctggtggaaaagcgcaccaagttctctcgccacaacgtgctccacctctggcccttcaccatccacgacctgcgggcactcggtgctaagaagttctacgggcgcttctgcaccggcaccctggaccacatcagtgagcaccacgtggtggcctggaggggcgggtgagcttgggcctagaggcaggccagtggggaaatgctgggacagccaaatgtcgaagtggacaagatccgtatcagccaggtgaccttgaagattcaggtcccccatctataagtgggcttttgggctgagtgattgctaaggccttttccagtctgaccctgaccaggcacacactggtacatggggagcttgtgctgccctagggtccctgttcctaatgtcctctcccttccaggcatcaggcagctccagctgcttctgctgaaggtagcattgctgctgggggtggaaattcactggggtgtcactttcactggcctccagccccctcctaggaagggtaagtatttctatgctccctggaatctccccctcccccatcaagaacttggccagtgtctgaaaaaggatgggccaggagtgtccttttctgtttttgttttgagacagagtctcgttctgtcacccaggctggagtgcagtggcatgatctcggctcactgcaacctctgccacccagtttcaagtgattctcctgcctcagcctcctgaggagctgggattacaggcatgtgccaccatgcccagctaatttttgtatttttttaagtagagacggggtttcactgtgttggccaggctggtctcgaactactgacctcaagtgatccacccacctcggtctcccaaagtgctgggattacaggcgtgacccaccatgccagccaggagtctccttttctaatagtgtggccttgggcaagccactctgagcctcagattgagcatttgcaaaacaagaataacacttccttcctcacctgccttccatagctgctgtgaaggtgtaatctgatagataatatatcattgctttctaaaccagagagtcctttacacgttttgatgatttcactggtttgtcctgagagtataggggctcttacgacttctacacctttgtgcctctcataccccctgccctagggagtggctggcgtgcccagctccaacccaacccccctgcccagctggccaactatgaatttgacgtccttatctcggctgcaggaggtaaattcgtccctgaaggtgagtgatcacttccctcaaagaagccagcatctctggcacatcctgggcctttctagattgttataaccccctcctcctgccattgttcacctaccgccacctctaggcttcaaagttcgagaaatgcgaggcaaactggccattggcatcacagccaactttgtgaatggacgcaccgtggaggagacacaggtgccggagatcagtggtgtagccaggatctacaaccagagcttcttccagagccttctcaaagccacaggtcagggaccctcttgctgaatttcccctccccctgcctgactgtggcctggctcctgcctctcccttccaaacttgtcctcactgcaaggaactccacacttttctgtttttttggtctcagcagcaaaggagaaggaacctgtcccctcagggattaagcaagcacagccctagttgatcacccagcatgaaaagtcctggaatctctcagagatgaacctgtgtatgggagttttgcttaagtggtacttcaagaaggtgcctctgtttactttggttttgcactgccatgcgaccaggtggtgcaggtctcccaaatgccacccccctccaagcttccctctttgctctaagtcctcaggcctcctgggcctgggacagatggttgtttgtgtcatcaggactcgtggggttctatgcgtggagcactcaccgcagcctaagctgggatcccagctcagaggtcaggccatgttgggatgtttagggaaggtgatgcattatcaggagacatatctactgtcccctgccctgtacccccaggcattgatctggagaacattgtgtactacaaggacgacacccactactttgtgatgacagccaagaagcagtgcctgctgcggctgggggtgctgcgccaggtgaggcccagtcctggccaggagaggctgggtggtgagccccgggaggcagaggctaggcttggacatagtcgacacctgggtgtggggaccccgtcctctcctgcctttgtcctggcattaacttcacctctaaaagttctcttggccaggcatggtggctcatgcctgtaatcccagcactttgggaagccgaggtgggtggatcacctgaggtcaggagttcaagaccagcctggccaacatggtgaaaccccgtctctactaaaagtacaaaaattagctgggcttgttggcgggcgcctgtaatcccagctactagggaggctgaggcaggagaatcatttgaacctgggaggcggaagttgcagtgagccaagattgtgccactgcactccagcctcggcaacaaagtgaaactctgtctcaaaaaaaaaaaaaaaaaaagttctcccctgggatttacaaggcagcaggaatcatattctgggctaaacaccttataccagccacagtagatgtgtgtcagctccatgagggcaggcatttctgtctctttgtctgttgcttgctgctaattgccagtacctggaacagtgccaaatacatagtaagcgctcggtatgtatttgctgaatgaatgaactagttgagtgcctaccatgtgctagatactgtgttgagagttaaatttgcatctcccatctaattctcatgagtaccctgataaattaggcatgttgtctctaagtgatggacaaactaaagctcttgagtttgtggcaagtatatgacagtaatgatatgggcagaacagagcctgggacacccagcagcagggtgaatgttgaagaaagggctttgagaattccaggctgctggaattctagtcccagctcagccttcaactgctgtgtagtctagggcagccccttccttctctgggccccaggatgtgcaccttctgcgcccaagggggtggcactggcccactgaccctgctctcagaggtctctgaggttctgctctgttgaccatacaggactggccagacaccaatcggctgctgggcagtgccaatgtggtgcccgaggctctgcagcgctttacccgggcagctgctgactttgccacccatggcaagctcgggaaactagagtttgcccaggatgcccatgggcagcctgatgtctctgcctttgacttcacgagcatgatgcgggcagagagttctgctcgtgtgcaagagaagcatggcgcccgcctgctgctgggactggtgggggactgcctggtggaggtgaggggttcaggaggcacaggggtttcatggttaggggagggagctgcctagtatggaggaggggataaaaaggtctgcctgcagaggggaggagctaagggctgcctggtgtggggatggccccttctgctgtgacctgggtggatatctgggcttgggatgcacctgttggattctccctgagctgcttcctattcctctgacactgcagcccttctggcccctgggcactggagtggcacggggcttcctggcagcctttgatgcagcctggatggtgaagcggtgggcagagggcgctgagtccctagaggtgttggctgagcggtaagacctgagttgaggaggatgtgggcagggcaggacatgtgacaaggttcaggaagaggggcaggggtgctgagtgaatagacggaggaataggcagaagaaaaggcctggcagttcctgagaggtgggtgctgacaggtgccctcccattcatgcccctgccccttaccctcaccccctcagtgagagcctgtaccagcttctgtcacagacatccccagaaaacatgcatcgcaatgtggcccagtatgggctggacccagccacccgctaccccaacctgaacctccgggcagtgacccccaatcaggtcagacccccgacacacccaccagccttcccaagccaacccccttcccccaggtcaggccctccctgcccagtcgctgccctttggggtcaatcctacccccggcaggcccttacccctggactcaggggctgtgtggccagcctgccttgagacctgagcggggctgccttaggtacgagacctgtatgatgtgctagccaaggagcctgtgcagaggaacaacgacaagacagatacagggatgccagccaccggtgagcaggccttcctcccaaggggtgaccaaaatatgtactacccagcgaggcccaggtggtccctgcaaagcagctgcagcctcaggacaggagcagcgtgccggagcactcattgttggctggtgggttggttgggggcctgctggaggaacggaggggcagcaccgcacaggcagcagttggctgccagtctgaatgtaagcgcgttagtgtttgaaccaccgttacagccatagtggtgctggcaacctcccctgcccccagtttagtctgctgccctctatgtggccagttgcgatttcactttattcactcctctactttattccaaagagattttttttaaaagagaattgggatggagagctgctgatagtcagctttaggctggtgccctagtagaggtgggtccctgactcctcctcccctacagaacccccacatgcagcagctgggctccctatatgcctgggatgggcagagggggccttgggcacagcacagccttctttcccagggtcggcaggcacccaggaggagctgctacgctggtgccaggagcagacagctgggtacccgggagtccacgtctccgatttgtcttcctcctgggctgatgggctagctctgtgtgccctggtgtaccggctgcagcctggcctgctgtgagtccctggcagacccacctctctctcatgatctcagtgtaggagttagcatatccagttgaatcctagagacagtgtgcttccctgcatctgccgacagtcttgtgagactctaatgcattcagatagtggagagctttgtgaatggcacaggcccccaaagccaggagtagtgtcactgggttgggcactgggtagcagagactacacacctaccttcaagccttcttgtaccccagctgctgcttgctgtccctcccctcctgctgcccttcctcccctcagtggggctaggttcttgtctctagttggcttttctccctgacatcccacagggaaccctcagagctgcaggggctgggagctctggaagcaactgcttgggcactaaaggtggcagagaatgagctgggcatcacaccggtggtgtctgcacaggccgtggtagcagggagtgacccactgggcctcattgcctacctcagccacttccacagtgccttcaagagcatggcccacagcccaggtgacctgaaggaaaggcgggcaggataactgggatggggaggtgtgtgtgtgtgtgtgtgtgtgtgtgacagagggagaaggcggtgtgtgtgtgtgtgtgtgtcagaaagaggaagaaggcgccctctgagggccagcctgggagaggtgtccttctgggttggagagtgactgtctgttctgagagtacagtattggcaccccccatccacactgatgccctggctctccccgcaggccctgtcagccaggcctccccagggacctccagtgctgtattattccttagtaaacttcagaggaccctgcagcgatcccgggccaaggtggagagtttaggcagggctggagctgagcagggaggagtgggcaggggggtacccagtggagatcctggggtgatggtgaggacattcagaaagtggggaggactgggacctcaaaacatcacacttagagctgttaggacttattgcaggaaaatgcagaggatgctggtggcaagaagctgcgcttggaggtgaatgcaggcaggggcgggtcggtctcctaccccacattttatcccctttcctggtactgtcttccctatttctcatcccatgtcttgttccccaccccaggtcctgtaacccccccatccagcctccctgcctagtctcactccccttcccttcagccccttgtgttcatctgtacgcatcccctcccagctggccctgcccctctaccctccctgcctgagcacttacctccttagatggaggccgagaccccaagtactgaggtgccacctgacccagagcctggtgtacccctgacacccccatcccaacaccaggaggtgagagccaggctttgtgtgcaggcagaggcccggggagggcagggcaggggcgtttcatgggagggaaagaactttggagctggccttggctccacctgaccctgtgtcctgggggtccacgcaggccggtgctggggacctgtgtgcactttgtggggaacacctctatgtcctggaacgcctctgtgtcaacggccatttcttccaccggagctgcttccgctgccatacctgtgaggccacactgtggccaggtggctacgagcagcacccaggagatggtgagtgggcctgggagacctccagagagactctgggcctggccctgcttgggggacacagagcttgaggtagagaggcacaggatggaaacaggctcaagatggcacttcgttctcctgagctcagggtcttctctgtcccctgcaaagctccagatgtgtggttctgaggaacaggaggctggcagaaattcacctgcaaatctgtcttgttttccccaccttccttcataaactgttgcgtgtctgggcactgggctgcccacaccaaatgcctcctcccctctctaccctttccaggacatttctactgcctccagcacctgccccagacagaccacaaagcggaaggcagcgatagaggccctgagagtccggtaaagactgaaggcgtgtatgtatattggggcatgggaagaggaagagggtctcgtcaaaccagcgctttgctgggggtaactgaatgtcgtcttctactagcatgtaagctctgtgaaggcagggatgcctgtctgcttacacttcttgttctctcaagtatctaaaacacagccagacactgtttgtaaatggttttaagtgaatgaatgccaaggctcacctttgctccgaaggggtggcctcaccccccgacctcactccacatggtggcttttccaggagctccccacaccaagtgagaatagcatgccaccaggcctctcaactcccacagcctcgcaggagggggccggtcctgttccagatcccagccagcccacccgtcggcagatccgcctctccagcccggagcgccagcggttgtcctcccttaaccttacccctgacccggaaatggagcctccacccaagcctccccgcagctgctccgccttggcccgccacgccctggagagcagctttgtgggctggggcctgccagtccagagccctcaaggtaacccatcctcacagatgtgctgacccagggtgggacagggtgggagcactggcttcctgcagaggaattctggggaatacagagggaagttgtggggatcccaggccgtggcagcctctcctctgctccattcttctcagttcctcccatgccccaacacatacattcagtctttaccagacttgcagggcctccgtcaccaccatgctctttgttgcctgactggggcaggcgctggaggcagtagaacgtctcagttcttcttctcagctcttgtggccatggagaaggaggaaaaagagagtcccttctccagtgaagaggaagaagaagatgtgcctttggactcagatgtggaacaggtgagtgggccagcgtgcagccacaaaacgctctccagcccactacaggagaaacctgcactggtccactgcacccttctcttggaatgtcttctcacttggcctgtcatatctctggcctctaccttttctaccagagcttaccccacttcagcacgggttattttctgcctttccaaacaacactcctatccaccagggggcccaggccctatccctgactggcctgaccctcctataggccctgcagacctttgccaagacctcaggcaccatgaataactacccaacatggcgtcggactctgctgcgccgtgcgaaggaggaggagatgaagaggttctgcaaggcccaggtgaagcccgggggttcccaaaattctgatggggtcaaagttctgagactgagatcagagttcctccagtgctctgttcttgagcaacctagagactcctggatattctgtcttgtacccctcagaccatccaacggcgactaaatgagattgaggctgccttgagggagctagaggccgagggcgtgaagctggagctggccttgaggcgccagagcagtgagtgacaagctaggacacccctctgccttctagcactgtgttcagctccacgctccagcccgtaggagtcccagtggctatgccacacagctaacacatacctgtgacacccggctctcctgtctcccctaagcctgtaactcctgtggtgctggctggaagcctcctgatcaccctacccatcttccttcttctcaggttccccagaacagcaaaagaaactatgggtaggacagctgctacagctcgttgacaagaaaaacagcctggtggctgaggaggccgagctcatgatcacgtaaggggaaggggatggtgacagtggcccatgggccaggctccagccccttgggcaccttagacagctctgcttctacaatccctgacctccacagggtgcaggaattgaatctggaggagaaacagtggcagctggaccaggagctacgaggctacatgaaccgggaaggtaggtgaaatgtggggagaagcagacacatcccagggatgtgtcatgcaagcctcatgatctcagatactgaccaagcaacatgatgctctagtctgtgtacctctgagacaattcaggaggaagccagaggagggggctccaaagccccttctcacttcagttcaatcagagctgcacagttggcttttgtataagatctccttcaaaaaaaatcgtgctgctcagtagtgctagaaaaccactggtgttggcaaccctcctaatttggcagcttaggaaacaaagcccgggttatagaaatcacataggctgggattaggttgtggccctcctgcttccctgcccagttccctgttctctaagctttgtctcctccttttagaaaacctaaagacagctgctgatcggcaggctgaggaccaggtcctgaggaagctggtggatttggtcaaccagagagatgccctcatccgcttccaggaggagcgcaggctcagcgagctggccttggggacaggggcccagggctagacgagggtgggccgtctgctttcgttcccacaaagaaagcacctcaccccagcacagtgccacccctgttcatctgggctgcctggcagagagccttgctgtttacaattaaaatgtttctgccacaaacag

SEQ ID NO: 284 - DNA, 11696 bp, Homo sapiens; identical to SEQ ID NO: 283

SEQ ID NO: 285 - DNA, 532 bp, Homo sapiens
ttatttatacctgggttttattagtgcttccagtgtaacagtatcacttcgtctaaacaagaaacagcatcttataatgccagcctttcatgcgtcattttgggtcaaccctggggtggtggagccgacagacctgggcccccaaacagctctgccacttgctgtgtgcagatcacagaacatctgtgactcagtttcctttttggtaaaatgggactgttgcaagcactgatgttgaggtaatactcataggatgacggtcaataaatgagacgatgttttttaatattaactagctaaaagactggacgcgtcccttcactttaggcgctgttccttatcgggaatacgacgaagctgatcccaaaggcctctccagcccttttcagcagacagtcccgtgggtcctcactctaaggcattctttgaagacttggtctctcttccacacacccctcccattccccatctcttagtggtggtctaacccgccccgccatccccttccctctcacttctcatatccatttgg

SEQ ID NO: 286 - DNA, 3160 bp, Homo sapiens
cactaaagggccaagctttattgttctttagttctgtccccctcctgctgccccaggagtagggctggctgaggctctgggcccagatcctgggcctcccttgcccttcctagcacatgctggagctcagcctgggccctatataagccattgacctcctgtacgtggaagaggtagaatgcacctgcccacagcaccagccctacactgggggtccagagcagtatggcagcttccccggcccctcctccagccgccaggacacacagcagtgccaggagaagcagccccaggccaatcacatagctagcgaaggtggcccaccagcgagcctgagccatgcccagacccagctccgtccaggcctcctttagcacacacatcaacggcgacctctctgctggtcctacaacagagcagggcagtggggcaggagagagtcaagagtggaagggctgcttcaagcggggcaagggccaaggaaagggtgggggtgactcaccgtgggtagagctggggttctgctgtggggggctgtgcctcacaaacagagtagccatcagggcttcatgatcagagaggggggtgcccctgtgagggtcaaagcctgtagtggtttcaaaactcttacaggagatgtaaaacccagaaactgcctaggaaaagtaagggccagagagaagcttatatatgagggcctcttcccagagaaccagctcccggctaccccactttccacccatcagtggtccaagactagactagctgagcaaaggatctacacaggttagtagacaaagagacacagcatatgaaagcatgttgaagggaggagcctgaccttgtaaagcacgtagtcaatgcggacaccaaagggaaatggcttcagctcctgctggctgacgtagcagttcttgggtaccattgtgttgccttcctcagagccctaagggaatcattggctcatgctaggatgtgggggagaaggagggagagaagctggggatataggtggggaagtaacaggcaagtcctcaccttgaagtcccgagtttcaagataggcatcatgaagccctgtccactccttcagcaggcagcagcccaggtcttctgggtgcatgttgaggtctccacacaacagaaccacgtctgccttcttggatgtgtggctgggggaaccaggttggtgaggcgggagttcttccatcaccagctcttccccatgactggggccttgttcaccctcagcccctgggtcccatcccacttcccatttcaagcccaggctcacacactggatgaactgggccaattcccaagcttgggccacacgatgtgctaggtagatgtccttctgtcgattgtattcggcatggagctgagcaagatagatgagatcacagcagataagactgagggtcccaggggtatgtctgaatcaagcctgtgtctgtcacttggcatggtgtttggtatacaatggataagccttgcccattgcttccttataagatcttgcccccacacctcatccccaggtatgagagctagagaagtaccatctctctgtcccaggactgggctgcatgtcccagccctaggcactgccagcttcactcacatgggtcacataggcgttgagcaccatgccacttagatggagcaccagcagccccacagccttcccactgaaccagtcaccatgatggatctgcaggcaggaggagatagaaactcagggcaccgccaccatctttctgcccatcccctgcagctctcagagggctgcctcctctaccttgtattactggaggtggggaagggaggtggaagaggtcaaaggtctgccttaccatgtaggggtagccattgagagtgtagatgtgctgggtaagctcctggattggatgtttggagaagacacagaggccactgccaatgattccgctgaaagccaagccctgcttaataaccagaaaaacagggagagacacccagccttcttcccctcccttgtcttccagctctgatcagctatttttttctttttctactgctgggactagccctagaaccaaggcgacagcctttggaggagtatagggcagccagaaaacaaagctgaaatgggctgaagtcataggaccttcttggttcacccttctccttctctcacatccagagggagaggaggctggaggagactggagagtgcaggcaggatagggaagggctggcagggccaagagcctcctgggatgacaacaggcttcaggccagtgggcttctcacctccggaagtggtgtgcagctgggtaggtaggtgacagcttctgtctcaggtactggaagtcctgctcactccacacctgagggaagcggtgaggatgcctgcttggtctttccccagtgggacggtctgtccctcctcccagcctgggttccgcaccgtgctgcacaatctcacctcctccagcaaagccaggtcgaagctctcctggttcagaaagtctcccaggcgcctcatgcggtcggcccggtgcttgctcaagtacggaatgcccctaaggaagggaagagcggggcaggggaggcgactgctgggaccaccggcgctggggccagatgtggactttggaggttcgggttttccctacaccctgagatcgtggggcgggatagggggaggaaggctgcatgggtgcgaacggaaggtggcccccagaccgcactccgcagacgcactcaccagcagttgaggttgaagatccgcagtcgcagggagaagttgggcttcatggttggggagctccaggggcgctaggcggctcgaactctccagcgacggccgcggtggggacgggggcggccggcggcgccttctccccagaccgttccttcttcgcaggcggcgcgcacaggtgggcaccaagcccgcgtggctcaggtcgggcccgactcccgcgttcccccggcaaccggccggctgttcccaatcaggcgggccgccaacccggaaaggcgatccgctgccgaaatccgggcgcccaggctcggtaagggccgcgcgctaggaccctgggggtccggagagcgcccccgggtgggcggctcccggttccttttcctccaagctcgtccccggcggtcgcggccgc

SEQ ID NO: 287 - DNA, 3160 bp, Homo sapiens; identical to SEQ ID NO: 286

SEQ ID NO: 288 - DNA, 532 bp, Homo sapiens; identical to SEQ ID NO: 285

SEQ ID NO: 289 - DNA, 532 bp, Homo sapiens; identical to SEQ ID NO: 285
